United States Patent Application Publication US 2023/0032369 A1 - sequence listing, part 2

SEQ ID NO: 20907 - RNA, 20 nt, Artificial Sequence
  HTT spacer sequence CTCN PAM
gacacacagcgcucuaucac

SEQ ID NO: 20908 - RNA, 20 nt, Artificial Sequence
  HTT spacer sequence CTCN PAM
ucagacacacagcgcucuau

SEQ ID NO: 20909 - RNA, 20 nt, Artificial Sequence
  HTT spacer sequence CTCN PAM
ucccuuguuguauaaccagc

SEQ ID NO: 20910 - RNA, 20 nt, Artificial Sequence
  HTT spacer sequence CTCN PAM
aauucagaaagcacuuugaa

SEQ ID NO: 20911 - RNA, 20 nt, Artificial Sequence
  HTT spacer sequence CTCN PAM
cccaaauuuccugaauugcu

SEQ ID NO: 20912 - RNA, 20 nt, Artificial Sequence
  HTT spacer sequence CTCN PAM
agaaaaguauaauagacgaa

SEQ ID NO: 20913 - RNA, 20 nt, Artificial Sequence
  HTT spacer sequence CTCN PAM
auucgucuauuauacuuuuc

SEQ ID NO: 20914 - RNA, 20 nt, Artificial Sequence
  HTT spacer sequence CTCN PAM
caauucgucuauuauacuuu

SEQ ID NO: 20915 - RNA, 20 nt, Artificial Sequence
  HTT spacer sequence CTCN PAM
ucaucccacacucucaauuc

SEQ ID NO: 20916 - RNA, 20 nt, Artificial Sequence
  HTT spacer sequence CTCN PAM
gaugucauccuuaucauuuu

SEQ ID NO: 20917 - RNA, 20 nt, Artificial Sequence
  HTT spacer sequence CTCN PAM
ccaaaguaaggagaguuccu

SEQ ID NO: 20918 - RNA, 20 nt, Artificial Sequence
  HTT spacer sequence CTCN PAM
aaaguaaggagaguuccucc

SEQ ID NO: 20919 - RNA, 20 nt, Artificial Sequence
  HTT spacer sequence CTCN PAM
uuacuuuggagagguuuuuu

SEQ ID NO: 20920 - RNA, 20 nt, Artificial Sequence
  HTT spacer sequence CTCN PAM
ccuuacuuuggagagguuuu

SEQ ID NO: 20921 - RNA, 20 nt, Artificial Sequence
  HTT spacer sequence CTCN PAM
gaaauauuccucuuuucuuc

SEQ ID NO: 20922 - RNA, 20 nt, Artificial Sequence
  HTT spacer sequence CTCN PAM
uuucuucuaacacuccugac

SEQ ID NO: 20923 - RNA, 20 nt, Artificial Sequence
  HTT spacer sequence CTCN PAM
ugacaguccgcaggcucucg

SEQ ID NO: 20924 - RNA, 20 nt, Artificial Sequence
  HTT spacer sequence CTCN PAM
cggguuucaucgucaccuca

SEQ ID NO: 20925 - RNA, 20 nt, Artificial Sequence
  HTT spacer sequence CTCN PAM
gguuucaucgucaccucacg

SEQ ID NO: 20926 - RNA, 20 nt, Artificial Sequence
  HTT spacer sequence CTCN PAM
cgcuuuuguccccacuucug

SEQ ID NO: 20927 - RNA, 20 nt, Artificial Sequence
  HTT spacer sequence CTCN PAM
gggacagaaguggggacaaa

SEQ ID NO: 20928 - RNA, 20 nt, Artificial Sequence
  HTT spacer sequence CTCN PAM
cagggacagaaguggggaca

SEQ ID NO: 20929 - RNA, 20 nt, Artificial Sequence
  HTT spacer sequence CTCN PAM
gcccaucccuggcccacagc

SEQ ID NO: 20930 - RNA, 20 nt, Artificial Sequence
  HTT spacer sequence CTCN PAM
aacccaccggccccugggca

SEQ ID NO: 20931 - RNA, 20 nt, Artificial Sequence
  HTT spacer sequence CTCN PAM
uuaacgcacaaauacagugg

SEQ ID NO: 20932 - RNA, 20 nt, Artificial Sequence
  HTT spacer sequence CTCN PAM
cacuuucugugguccugcag

SEQ ID NO: 20933 - RNA, 20 nt, Artificial Sequence
  HTT spacer sequence CTCN PAM
cuuucugugguccugcagcu

SEQ ID NO: 20934 - RNA, 20 nt, Artificial Sequence
  HTT spacer sequence CTCN PAM
guccucggccucggaaaggg

SEQ ID NO: 20935 - RNA, 20 nt, Artificial Sequence
  HTT spacer sequence CTCN PAM
gccucggaaagggcugcugu

SEQ ID NO: 20936 - RNA, 20 nt, Artificial Sequence
  HTT spacer sequence CTCN PAM
gaaagggcugcuguccccag

SEQ ID NO: 20937 - RNA, 20 nt, Artificial Sequence
  HTT spacer sequence CTCN PAM
gucugccuaccuggggacag

SEQ ID NO: 20938 - RNA, 20 nt, Artificial Sequence
  HTT spacer sequence CTCN PAM
gagcccucgcaggccagcca

SEQ ID NO: 20939 - RNA, 20 nt, Artificial Sequence
  HTT spacer sequence CTCN PAM
gagcucugucugccuaccug

SEQ ID NO: 20940 - RNA, 20 nt, Artificial Sequence
  HTT spacer sequence CTCN PAM
caggccagccacucuguagg

SEQ ID NO: 20941 - RNA, 20 nt, Artificial Sequence
  HTT spacer sequence CTCN PAM
guaggaaggccaggaggacc

SEQ ID NO: 20942 - RNA, 20 nt, Artificial Sequence
  HTT spacer sequence CTCN PAM
uggccuuccuacagaguggc

SEQ ID NO: 20943 - RNA, 20 nt, Artificial Sequence
  HTT spacer sequence CTCN PAM
gucugcccaccugggguccu

SEQ ID NO: 20944 - RNA, 20 nt, Artificial Sequence
  HTT spacer sequence CTCN PAM
gagcccuugugggccagcgg

SEQ ID NO: 20945 - RNA, 20 nt, Artificial Sequence
  HTT spacer sequence CTCN PAM
gagcucugucugcccaccug

SEQ ID NO: 20946 - RNA, 20 nt, Artificial Sequence
  HTT spacer sequence CTCN PAM
guaggaggaggagcauaucu

SEQ ID NO: 20947 - RNA, 20 nt, Artificial Sequence
  HTT spacer sequence CTCN PAM
uacagagccgcuggcccaca

SEQ ID NO: 20948 - RNA, 20 nt, Artificial Sequence
  HTT spacer sequence CTCN PAM
uccuacagagccgcuggccc

SEQ ID NO: 20949 - RNA, 20 nt, Artificial Sequence
  HTT spacer sequence CTCN PAM
uccuccuacagagccgcugg

SEQ ID NO: 20950 - RNA, 20 nt, Artificial Sequence
  HTT spacer sequence CTCN PAM
gcuucaggugccagugcgug

SEQ ID NO: 20951 - RNA, 20 nt, Artificial Sequence
  HTT spacer sequence CTCN PAM
ggucucggcuucaggugcca

SEQ ID NO: 20952 - RNA, 20 nt, Artificial Sequence
  HTT spacer sequence CTCN PAM
ugugguggagauguauuuug

SEQ ID NO: 20953 - RNA, 20 nt, Artificial Sequence
  HTT spacer sequence CTCN PAM
accacacgagugucgggauc

SEQ ID NO: 20954 - RNA, 20 nt, Artificial Sequence
  HTT spacer sequence CTCN PAM
accuuaagacugauuaaaug

SEQ ID NO: 20955 - RNA, 20 nt, Artificial Sequence
  HTT spacer sequence CTCN PAM
cuccaccuuaagacugauua

SEQ ID NO: 20956 - RNA, 20 nt, Artificial Sequence
  HTT spacer sequence CTCN PAM
uucugccguguucucacuuc

SEQ ID NO: 20957 - RNA, 20 nt, Artificial Sequence
  HTT spacer sequence CTCN PAM
cuucuccuuucuggcagaag

SEQ ID NO: 20958 - RNA, 20 nt, Artificial Sequence
  HTT spacer sequence CTCN PAM
uuucuggcagaagacauuca

SEQ ID NO: 20959 - RNA, 20 nt, Artificial Sequence
  HTT spacer sequence CTCN PAM
aaaagauugcuucugucagc

SEQ ID NO: 20960 - RNA, 20 nt, Artificial Sequence
  HTT spacer sequence CTCN PAM
ggguuccugcaucuauugcu

SEQ ID NO: 20961 - RNA, 20 nt, Artificial Sequence
  HTT spacer sequence CTCN PAM
caagggugggaagucucuag

SEQ ID NO: 20962 - RNA, 20 nt, Artificial Sequence
  HTT spacer sequence CTCN PAM
agcuccucgccgugcuggcu

SEQ ID NO: 20963 - RNA, 20 nt, Artificial Sequence
  HTT spacer sequence CTCN PAM
ucgccgugcuggcucugugu

SEQ ID NO: 20964 - RNA, 20 nt, Artificial Sequence
  HTT spacer sequence CTCN PAM
ccgugcuggcucuguguguc

SEQ ID NO: 20965 - RNA, 20 nt, Artificial Sequence
  HTT spacer sequence CTCN PAM
gugugucccucugaggaagu

SEQ ID NO: 20966 - RNA, 20 nt, Artificial Sequence
  HTT spacer sequence CTCN PAM
gaggaaguguguccuggcuc

SEQ ID NO: 20967 - RNA, 20 nt, Artificial Sequence
  HTT spacer sequence CTCN PAM
gagggacacacagagccagc

SEQ ID NO: 20968 - RNA, 20 nt, Artificial Sequence
  HTT spacer sequence CTCN PAM
ucgccacgcuggcucugugu

SEQ ID NO: 20969 - RNA, 20 nt, Artificial Sequence
  HTT spacer sequence CTCN PAM
ccacgcuggcucuguguguc

SEQ ID NO: 20970 - RNA, 20 nt, Artificial Sequence
  HTT spacer sequence CTCN PAM
gugugucccucugaggaagu

SEQ ID NO: 20971 - RNA, 20 nt, Artificial Sequence
  HTT spacer sequence CTCN PAM
gaggaaguguauccuggcca

SEQ ID NO: 20972 - RNA, 20 nt, Artificial Sequence
  HTT spacer sequence CTCN PAM
gagggacacacagagccagc

SEQ ID NO: 20973 - RNA, 20 nt, Artificial Sequence
  HTT spacer sequence CTCN PAM
gcguggccaggauacacuuc

SEQ ID NO: 20974 - RNA, 20 nt, Artificial Sequence
  HTT spacer sequence CTCN PAM
uccuucuuuucccaguguca

SEQ ID NO: 20975 - RNA, 20 nt, Artificial Sequence
  HTT spacer sequence CTCN PAM
uucuuuucccagugucagac

SEQ ID NO: 20976 - RNA, 20 nt, Artificial Sequence
  HTT spacer sequence CTCN PAM
auggagagccccagucacag

SEQ ID NO: 20977 - RNA, 20 nt, Artificial Sequence
  HTT spacer sequence CTCN PAM
auggagggacgggccugucc

SEQ ID NO: 20978 - RNA, 20 nt, Artificial Sequence
  HTT spacer sequence CTCN PAM
ccauggagggacgggccugu

SEQ ID NO: 20979 - RNA, 20 nt, Artificial Sequence
  HTT spacer sequence CTCN PAM
gugacuggggcucuccaugg

SEQ ID NO: 20980 - RNA, 20 nt, Artificial Sequence
  HTT spacer sequence CTCN PAM
ucugugacuggggcucucca

SEQ ID NO: 20981 - RNA, 20 nt, Artificial Sequence
  HTT spacer sequence CTCN PAM
uccucugugacuggggcucu

SEQ ID NO: 20982 - RNA, 20 nt, Artificial Sequence
  HTT spacer sequence CTCN PAM
cgucuccuccucugugacug

SEQ ID NO: 20983 - RNA, 20 nt, Artificial Sequence
  HTT spacer sequence CTCN PAM
cucccgucuccuccucugug

SEQ ID NO: 20984 - RNA, 20 nt, Artificial Sequence
  HTT spacer sequence CTCN PAM
ucccucccgucuccuccucu

SEQ ID NO: 20985 - RNA, 20 nt, Artificial Sequence
  HTT spacer sequence CTCN PAM
uccucccucccgucuccucc

SEQ ID NO: 20986 - RNA, 20 nt, Artificial Sequence
  HTT spacer sequence CTCN PAM
cgucuccuccucccucccgu

SEQ ID NO: 20987 - RNA, 20 nt, Artificial Sequence
  HTT spacer sequence CTCN PAM
cucccgucuccuccucccuc

SEQ ID NO: 20988 - RNA, 20 nt, Artificial Sequence
  HTT spacer sequence CTCN PAM
ucccucccgucuccuccucc

SEQ ID NO: 20989 - RNA, 20 nt, Artificial Sequence
  HTT spacer sequence CTCN PAM
uccucccucccgucuccucc

SEQ ID NO: 20990 - RNA, 20 nt, Artificial Sequence
  HTT spacer sequence CTCN PAM
cgucuccuccucccucccgu

SEQ ID NO: 20991 - RNA, 20 nt, Artificial Sequence
  HTT spacer sequence CTCN PAM
cucccgucuccuccucccuc

SEQ ID NO: 20992 - RNA, 20 nt, Artificial Sequence
  HTT spacer sequence CTCN PAM
ucccucccgucuccuccucc

SEQ ID NO: 20993 - RNA, 20 nt, Artificial Sequence
  HTT spacer sequence CTCN PAM
uccucccucccgucuccucc

SEQ ID NO: 20994 - RNA, 20 nt, Artificial Sequence
  HTT spacer sequence CTCN PAM
cgucuccuccucccucccgu

SEQ ID NO: 20995 - RNA, 20 nt, Artificial Sequence
  HTT spacer sequence CTCN PAM
cucccgucuccuccucccuc

SEQ ID NO: 20996 - RNA, 20 nt, Artificial Sequence
  HTT spacer sequence CTCN PAM
ucccucccgucuccuccucc

SEQ ID NO: 20997 - RNA, 20 nt, Artificial Sequence
  HTT spacer sequence CTCN PAM
uauaagcaaagaaacugaag

SEQ ID NO: 20998 - RNA, 20 nt, Artificial Sequence
  HTT spacer sequence CTCN PAM
uuuuacucuuauaagcaaag

SEQ ID NO: 20999 - RNA, 20 nt, Artificial Sequence
  HTT spacer sequence CTCN PAM
ugugcacauuaaacaagaua

SEQ ID NO: 21000 - RNA, 20 nt, Artificial Sequence
  HTT spacer sequence CTCN PAM
agaucggugucacauucugc

SEQ ID NO: 21001 - RNA, 20 nt, Artificial Sequence
  HTT spacer sequence CTCN PAM
gugcccuacaucuaacaacg

SEQ ID NO: 21002 - RNA, 20 nt, Artificial Sequence
  HTT spacer sequence CTCN PAM
gccucggugcccuacaucua

SEQ ID NO: 21003 - RNA, 20 nt, Artificial Sequence
  HTT spacer sequence CTCN PAM
ccacucugccucggugcccu

SEQ ID NO: 21004 - RNA, 20 nt, Artificial Sequence
  HTT spacer sequence CTCN PAM
caguagucugcaggugagau

SEQ ID NO: 21005 - RNA, 20 nt, Artificial Sequence
  HTT spacer sequence CTCN PAM
ccugcagacuacugugagcu

SEQ ID NO: 21006 - RNA, 20 nt, Artificial Sequence
  HTT spacer sequence CTCN PAM
ggccugcaggggaaagcccu

SEQ ID NO: 21007 - RNA, 20 nt, Artificial Sequence
  HTT spacer sequence CTCN PAM
gccagggcuuuccccugcag

SEQ ID NO: 21008 - RNA, 20 nt, Artificial Sequence
  HTT spacer sequence CTCN PAM
cagccagggcuuuccccugc

SEQ ID NO: 21009 - RNA, 20 nt, Artificial Sequence
  HTT spacer sequence CTCN PAM
acccuggcucccacccaccc

SEQ ID NO: 21010 - RNA, 20 nt, Artificial Sequence
  HTT spacer sequence CTCN PAM
cacccaccccccagcccugg

SEQ ID NO: 21011 - RNA, 20 nt, Artificial Sequence
  HTT spacer sequence CTCN PAM
acacgcccagccccaugguc

SEQ ID NO: 21012 - RNA, 20 nt, Artificial Sequence
  HTT spacer sequence CTCN PAM
aggaccauggggcugggcgu

SEQ ID NO: 21013 - RNA, 20 nt, Artificial Sequence
  HTT spacer sequence CTCN PAM
ccaggaccauggggcugggc

SEQ ID NO: 21014 - RNA, 20 nt, Artificial Sequence
  HTT spacer sequence CTCN PAM
agcccuggacccuccagcgc

SEQ ID NO: 21015 - RNA, 20 nt, Artificial Sequence
  HTT spacer sequence CTCN PAM
agcgccugcagccccugcug

SEQ ID NO: 21016 - RNA, 20 nt, Artificial Sequence
  HTT spacer sequence CTCN PAM
ggcagaaagaggcccccucc

SEQ ID NO: 21017 - RNA, 20 nt, Artificial Sequence
  HTT spacer sequence CTCN PAM
uucugccugaggcaccagaa

SEQ ID NO: 21018 - RNA, 20 nt, Artificial Sequence
  HTT spacer sequence CTCN PAM
cccacacccugcccuccacg

SEQ ID NO: 21019 - RNA, 20 nt, Artificial Sequence
  HTT spacer sequence CTCN PAM
acggcagugacaggagccug

SEQ ID NO: 21020 - RNA, 20 nt, Artificial Sequence
  HTT spacer sequence CTCN PAM
ugucacugccguggagggca

SEQ ID NO: 21021 - RNA, 20 nt, Artificial Sequence
  HTT spacer sequence CTCN PAM
ggcuguguuuccacacagag

SEQ ID NO: 21022 - RNA, 20 nt, Artificial Sequence
  HTT spacer sequence CTCN PAM
guguggaaacacagccagag

SEQ ID NO: 21023 - RNA, 20 nt, Artificial Sequence
  HTT spacer sequence CTCN PAM
cacugaccacagccuauaaa

SEQ ID NO: 21024 - RNA, 20 nt, Artificial Sequence
  HTT spacer sequence CTCN PAM
gugcacugaggugggccugg

SEQ ID NO: 21025 - RNA, 20 nt, Artificial Sequence
  HTT spacer sequence CTCN PAM
gugcacugagucucccacug

SEQ ID NO: 21026 - RNA, 20 nt, Artificial Sequence
  HTT spacer sequence CTCN PAM
agcaccccaguguuuuuaug

SEQ ID NO: 21027 - RNA, 20 nt, Artificial Sequence
  HTT spacer sequence CTCN PAM
ccgaguuccaaggagggacu

SEQ ID NO: 21028 - RNA, 20 nt, Artificial Sequence
  HTT spacer sequence CTCN PAM
gggagcauuuuucccauaaa

SEQ ID NO: 21029 - RNA, 20 nt, Artificial Sequence
  HTT spacer sequence CTCN PAM
uuggaacucggggagcauuu

SEQ ID NO: 21030 - RNA, 20 nt, Artificial Sequence
  HTT spacer sequence CTCN PAM
gucccuccuuggaacucggg

SEQ ID NO: 21031 - RNA, 20 nt, Artificial Sequence
  HTT spacer sequence CTCN PAM
ucagucccuccuuggaacuc

SEQ ID NO: 21032 - RNA, 20 nt, Artificial Sequence
  HTT spacer sequence CTCN PAM
ccaagccaacuccucagucc

SEQ ID NO: 21033 - RNA, 20 nt, Artificial Sequence
  HTT spacer sequence CTCN PAM
gcugggcugucucugccugg

SEQ ID NO: 21034 - RNA, 20 nt, Artificial Sequence
  HTT spacer sequence CTCN PAM
gccuggucauccugucuagu

SEQ ID NO: 21035 - RNA, 20 nt, Artificial Sequence
  HTT spacer sequence CTCN PAM
cuuagaaauauuuuguguuc

SEQ ID NO: 21036 - RNA, 20 nt, Artificial Sequence
  HTT spacer sequence CTCN PAM
uugaacacaaaauauuucua

SEQ ID NO: 21037 - RNA, 20 nt, Artificial Sequence
  HTT spacer sequence CTCN PAM
cuggcacggcucguugaaca

SEQ ID NO: 21038 - RNA, 20 nt, Artificial Sequence
  HTT spacer sequence CTCN PAM
cacuggcacggcucguugaa

SEQ ID NO: 21039 - RNA, 20 nt, Artificial Sequence
  HTT spacer sequence CTCN PAM
cucacuggcacggcucguug

SEQ ID NO: 21040 - RNA, 20 nt, Artificial Sequence
  HTT spacer sequence CTCN PAM
cgcuggagaguuuuaguuuu

SEQ ID NO: 21041 - RNA, 20 nt, Artificial Sequence
  HTT spacer sequence CTCN PAM
cuggagaguuuuaguuuugu

SEQ ID NO: 21042 - RNA, 20 nt, Artificial Sequence
  HTT spacer sequence CTCN PAM
agcgagagccuaagcuauaa

SEQ ID NO: 21043 - RNA, 20 nt, Artificial Sequence
  HTT spacer sequence CTCN PAM
ccagcgagagccuaagcuau

SEQ ID NO: 21044 - RNA, 20 nt, Artificial Sequence
  HTT spacer sequence CTCN PAM
guuuuaaggaaguuggacua

SEQ ID NO: 21045 - RNA, 20 nt, Artificial Sequence
  HTT spacer sequence CTCN PAM
aacuugacaaagauugccaa

SEQ ID NO: 21046 - RNA, 20 nt, Artificial Sequence
  HTT spacer sequence CTCN PAM
uuggcuacaaacggguggcc

SEQ ID NO: 21047 - RNA, 20 nt, Artificial Sequence
  HTT spacer sequence CTCN PAM
ggaaaaaggguuacagcugg

SEQ ID NO: 21048 - RNA, 20 nt, Artificial Sequence
  HTT spacer sequence CTCN PAM
ggggggcacggcagggcugu

SEQ ID NO: 21049 - RNA, 20 nt, Artificial Sequence
  HTT spacer sequence CTCN PAM
cugcccccacccacagcccu

SEQ ID NO: 21050 - RNA, 20 nt, Artificial Sequence
  HTT spacer sequence CTCN PAM
agcuggaaucugcucccugc

SEQ ID NO: 21051 - RNA, 20 nt, Artificial Sequence
  HTT spacer sequence CTCN PAM
ccagcuggaaucugcucccu

SEQ ID NO: 21052 - RNA, 20 nt, Artificial Sequence
  HTT spacer sequence CTCN PAM
auaaugcuagaaugugcuuc

SEQ ID NO: 21053 - RNA, 20 nt, Artificial Sequence
  HTT spacer sequence CTCN PAM
cuauaaugcuagaaugugcu

SEQ ID NO: 21054 - RNA, 20 nt, Artificial Sequence
  HTT spacer sequence CTCN PAM
cacuucugucugaauaacuu

SEQ ID NO: 21055 - RNA, 20 nt, Artificial Sequence
  HTT spacer sequence CTCN PAM
accucacacuucugucugaa

SEQ ID NO: 21056 - RNA, 20 nt, Artificial Sequence
  HTT spacer sequence CTCN PAM
agcucgaccucacacuucug

SEQ ID NO: 21057 - RNA, 20 nt, Artificial Sequence
  HTT spacer sequence CTCN PAM
cuccagcucgaccucacacu

SEQ ID NO: 21058 - RNA, 20 nt, Artificial Sequence
  HTT spacer sequence CTCN PAM
uuucuucacaacgccccauc

SEQ ID NO: 21059 - RNA, 20 nt, Artificial Sequence
  HTT spacer sequence CTCN PAM
uggaaaaaggaaccucucac

SEQ ID NO: 21060 - RNA, 20 nt, Artificial Sequence
  HTT spacer sequence CTCN PAM
caccucuccuggucuggcuc

SEQ ID NO: 21061 - RNA, 20 nt, Artificial Sequence
  HTT spacer sequence CTCN PAM
ccucuccuggucuggcucug

SEQ ID NO: 21062 - RNA, 20 nt, Artificial Sequence
  HTT spacer sequence CTCN PAM
ccuggucuggcucugcacag

SEQ ID NO: 21063 - RNA, 20 nt, Artificial Sequence
  HTT spacer sequence CTCN PAM
uggucuggcucugcacagag

SEQ ID NO: 21064 - RNA, 20 nt, Artificial Sequence
  HTT spacer sequence CTCN PAM
gcacagagcuggagccgcgg

SEQ ID NO: 21065 - RNA, 20 nt, Artificial Sequence
  HTT spacer sequence CTCN PAM
gugcagagccagaccaggag

SEQ ID NO: 21066 - RNA, 20 nt, Artificial Sequence
  HTT spacer sequence CTCN PAM
agcucugugcagagccagac

SEQ ID NO: 21067 - RNA, 20 nt, Artificial Sequence
  HTT spacer sequence CTCN PAM
guuggucaagcucugugcca

SEQ ID NO: 21068 - RNA, 20 nt, Artificial Sequence
  HTT spacer sequence CTCN PAM
gugccaagaggccugccaga

SEQ ID NO: 21069 - RNA, 20 nt, Artificial Sequence
  HTT spacer sequence CTCN PAM
uggcacagagcuugaccaac

SEQ ID NO: 21070 - RNA, 20 nt, Artificial Sequence
  HTT spacer sequence CTCN PAM
cccacugcagccuccacagg

SEQ ID NO: 21071 - RNA, 20 nt, Artificial Sequence
  HTT spacer sequence CTCN PAM
acagguggauguucccgcug

SEQ ID NO: 21072 - RNA, 20 nt, Artificial Sequence
  HTT spacer sequence CTCN PAM
ccuucugaagucggggugug

SEQ ID NO: 21073 - RNA, 20 nt, Artificial Sequence
  HTT spacer sequence CTCN PAM
acaccccgacuucagaaggu

SEQ ID NO: 21074 - RNA, 20 nt, Artificial Sequence
  HTT spacer sequence CTCN PAM
ccgauagucuccacaccccg

SEQ ID NO: 21075 - RNA, 20 nt, Artificial Sequence
  HTT spacer sequence CTCN PAM
cagagcgcccaccuccuccu

SEQ ID NO: 21076 - RNA, 20 nt, Artificial Sequence
  HTT spacer sequence CTCN PAM
gggagcuccccgauagucuc

SEQ ID NO: 21077 - RNA, 20 nt, Artificial Sequence
  HTT spacer sequence CTCN PAM
uccugcguacggcgucugug

SEQ ID NO: 21078 - RNA, 20 nt, Artificial Sequence
  HTT spacer sequence CTCN PAM
ugcguacggcgucugugcca

SEQ ID NO: 21079 - RNA, 20 nt, Artificial Sequence
  HTT spacer sequence CTCN PAM
ggcuuugggggacgguggca

SEQ ID NO: 21080 - RNA, 20 nt, Artificial Sequence
  HTT spacer sequence CTCN PAM
agcugcuucucaaacacucc

SEQ ID NO: 21081 - RNA, 20 nt, Artificial Sequence
  HTT spacer sequence CTCN PAM
aacacuccguucucgcagcc

SEQ ID NO: 21082 - RNA, 20 nt, Artificial Sequence
  HTT spacer sequence CTCN PAM
guucucgcagccucacccug

SEQ ID NO: 21083 - RNA, 20 nt, Artificial Sequence
  HTT spacer sequence CTCN PAM
cagccucacccuggggaccc

SEQ ID NO: 21084 - RNA, 20 nt, Artificial Sequence
  HTT spacer sequence CTCN PAM
cccuggggacccccgacacg

SEQ ID NO: 21085 - RNA, 20 nt, Artificial Sequence
  HTT spacer sequence CTCN PAM
auccccauguccuccucaug

SEQ ID NO: 21086 - RNA, 20 nt, Artificial Sequence
  HTT spacer sequence CTCN PAM
ucaugccuugugccucagcu

SEQ ID NO: 21087 - RNA, 20 nt, Artificial Sequence
  HTT spacer sequence CTCN PAM
ugccuugugccucagcucug

SEQ ID NO: 21088 - RNA, 20 nt, Artificial Sequence
  HTT spacer sequence CTCN PAM
gcucugcccugaccccacuc

SEQ ID NO: 21089 - RNA, 20 nt, Artificial Sequence
  HTT spacer sequence CTCN PAM
gcccugaccccacucugucc

SEQ ID NO: 21090 - RNA, 20 nt, Artificial Sequence
  HTT spacer sequence CTCN PAM
guccacucagcugccccccu

SEQ ID NO: 21091 - RNA, 20 nt, Artificial Sequence
  HTT spacer sequence CTCN PAM
gcugccccccuacucguccu

SEQ ID NO: 21092 - RNA, 20 nt, Artificial Sequence
  HTT spacer sequence CTCN PAM
uccuccaugcagaccucagu

SEQ ID NO: 21093 - RNA, 20 nt, Artificial Sequence
  HTT spacer sequence CTCN PAM
augcagaccucagucuuggc

SEQ ID NO: 21094 - RNA, 20 nt, Artificial Sequence
  HTT spacer sequence CTCN PAM
gucuuggcccugucucugca

SEQ ID NO: 21095 - RNA, 20 nt, Artificial Sequence
  HTT spacer sequence CTCN PAM
gcagccauccucccgcuccc

SEQ ID NO: 21096 - RNA, 20 nt, Artificial Sequence
  HTT spacer sequence CTCN PAM
cgcucccuucuccugaacgc

SEQ ID NO: 21097 - RNA, 20 nt, Artificial Sequence
  HTT spacer sequence CTCN PAM
cuucuccugaacgcuggugg

SEQ ID NO: 21098 - RNA, 20 nt, Artificial Sequence
  HTT spacer sequence CTCN PAM
ugaacgcuggugguugcccc

SEQ ID NO: 21099 - RNA, 20 nt, Artificial Sequence
  HTT spacer sequence CTCN PAM
accagcucagagccccuguu

SEQ ID NO: 21100 - RNA, 20 nt, Artificial Sequence
  HTT spacer sequence CTCN PAM
gagccccuguucccccaacc

SEQ ID NO: 21101 - RNA, 20 nt, Artificial Sequence
  HTT spacer sequence CTCN PAM
gagcugguggagggguccag

SEQ ID NO: 21102 - RNA, 20 nt, Artificial Sequence
  HTT spacer sequence CTCN PAM
aauggugccucaggcacaug

SEQ ID NO: 21103 - RNA, 20 nt, Artificial Sequence
  HTT spacer sequence CTCN PAM
ggcacaugcgguuucccucu

SEQ ID NO: 21104 - RNA, 20 nt, Artificial Sequence
  HTT spacer sequence CTCN PAM
ucccuuccugaccaccugcc

SEQ ID NO: 21105 - RNA, 20 nt, Artificial Sequence
  HTT spacer sequence CTCN PAM
ggaugggggcagguggucag

SEQ ID NO: 21106 - RNA, 20 nt, Artificial Sequence
  HTT spacer sequence CTCN PAM
acguggcaggucagaguugu

SEQ ID NO: 21107 - RNA, 20 nt, Artificial Sequence
  HTT spacer sequence CTCN PAM
gaccugccacguggagguca

SEQ ID NO: 21108 - RNA, 20 nt, Artificial Sequence
  HTT spacer sequence CTCN PAM
ugccagccgcugugccgggu

SEQ ID NO: 21109 - RNA, 20 nt, Artificial Sequence
  HTT spacer sequence CTCN PAM
cgugccagccgcugugccgg

SEQ ID NO: 21110 - RNA, 20 nt, Artificial Sequence
  HTT spacer sequence CTCN PAM
acagacagcucucgugccag

SEQ ID NO: 21111 - RNA, 20 nt, Artificial Sequence
  HTT spacer sequence CTCN PAM
ggcugaugucugcugaacac

SEQ ID NO: 21112 - RNA, 20 nt, Artificial Sequence
  HTT spacer sequence CTCN PAM
cccugacgcucuggcugaug

SEQ ID NO: 21113 - RNA, 20 nt, Artificial Sequence
  HTT spacer sequence CTCN PAM
aaaagcacacacaagcacag

SEQ ID NO: 21114 - RNA, 20 nt, Artificial Sequence
  HTT spacer sequence CTCN PAM
ugugugacugguguugcggg

SEQ ID NO: 21115 - RNA, 20 nt, Artificial Sequence
  HTT spacer sequence CTCN PAM
uccugggcugcucugcgcgc

SEQ ID NO: 21116 - RNA, 20 nt, Artificial Sequence
  HTT spacer sequence CTCN PAM
ugggcugcucugcgcgccug

SEQ ID NO: 21117 - RNA, 20 nt, Artificial Sequence
  HTT spacer sequence CTCN PAM
gcgcgccugccaggcucuuc

SEQ ID NO: 21118 - RNA, 20 nt, Artificial Sequence
  HTT spacer sequence CTCN PAM
uccagugccuucacccaaca

SEQ ID NO: 21119 - RNA, 20 nt, Artificial Sequence
  HTT spacer sequence CTCN PAM
aaaggcccgcguguugggug

SEQ ID NO: 21120 - RNA, 20 nt, Artificial Sequence
  HTT spacer sequence CTCN PAM
gaccuggccauggcggaaga

SEQ ID NO: 21121 - RNA, 20 nt, Artificial Sequence
  HTT spacer sequence CTCN PAM
accugcagcuccacagcuga

SEQ ID NO: 21122 - RNA, 20 nt, Artificial Sequence
  HTT spacer sequence CTCN PAM
acagcugacaggccgaucuc

SEQ ID NO: 21123 - RNA, 20 nt, Artificial Sequence
  HTT spacer sequence CTCN PAM
uggggcaagucacuuucucu

SEQ ID NO: 21124 - RNA, 20 nt, Artificial Sequence
  HTT spacer sequence CTCN PAM
cuccuagccuugugucuuca

SEQ ID NO: 21125 - RNA, 20 nt, Artificial Sequence
  HTT spacer sequence CTCN PAM
ccuagccuugugucuucauc

SEQ ID NO: 21126 - RNA, 20 nt, Artificial Sequence
  HTT spacer sequence CTCN PAM
uagccuugugucuucaucuc

SEQ ID NO: 21127 - RNA, 20 nt, Artificial Sequence
  HTT spacer sequence CTCN PAM
ccgguccuuguuagcgaaca

SEQ ID NO: 21128 - RNA, 20 nt, Artificial Sequence
  HTT spacer sequence CTCN PAM
gugccuguucgcuaacaagg

SEQ ID NO: 21129 - RNA, 20 nt, Artificial Sequence
  HTT spacer sequence CTCN PAM
ccaggccucagugccuguuc

SEQ ID NO: 21130 - RNA, 20 nt, Artificial Sequence
  HTT spacer sequence CTCN PAM
cccaucaggcagccguuugu

SEQ ID NO: 21131 - RNA, 20 nt, Artificial Sequence
  HTT spacer sequence CTCN PAM
uuaaaauauaaaguauaauu

SEQ ID NO: 21132 - RNA, 20 nt, Artificial Sequence
  HTT spacer sequence CTCN PAM
ugcuacuuuuggugcacacu

SEQ ID NO: 21133 - RNA, 20 nt, Artificial Sequence
  HTT spacer sequence CTCN PAM
gagggggaauuauuacacac

SEQ ID NO: 21134 - RNA, 20 nt, Artificial Sequence
  HTT spacer sequence CTCN PAM
gaguacuuacccauguugau

SEQ ID NO: 21135 - RNA, 20 nt, Artificial Sequence
  HTT spacer sequence CTCN PAM
ugguuucugaaaaaggugug

SEQ ID NO: 21136 - RNA, 20 nt, Artificial Sequence
  HTT spacer sequence CTCN PAM
uuuuuccauucacauacuuu

SEQ ID NO: 21137 - RNA, 20 nt, Artificial Sequence
  HTT spacer sequence CTCN PAM
augugucuguuagauuuaau

SEQ ID NO: 21138 - RNA, 20 nt, Artificial Sequence
  HTT spacer sequence CTCN PAM
cuaugugucuguuagauuua

SEQ ID NO: 21139 - RNA, 20 nt, Artificial Sequence
  HTT spacer sequence CTCN PAM
guaugcuauaauuuuuuuaa

SEQ ID NO: 21140 - RNA, 20 nt, Artificial Sequence
  HTT spacer sequence CTCN PAM
ugacagcaguguauuugaau

SEQ ID NO: 21141 - RNA, 20 nt, Artificial Sequence
  HTT spacer sequence CTCN PAM
cauuuuaauuucuuccuuga

SEQ ID NO: 21142 - RNA, 20 nt, Artificial Sequence
  HTT spacer sequence CTCN PAM
uuuucuugauuauacuuuug

SEQ ID NO: 21143 - RNA, 20 nt, Artificial Sequence
  HTT spacer sequence CTCN PAM
cucuuuuucuugauuauacu

SEQ ID NO: 21144 - RNA, 20 nt, Artificial Sequence
  HTT spacer sequence CTCN PAM
gcacuuugggaggcugaugc

SEQ ID NO: 21145 - RNA, 20 nt, Artificial Sequence
  HTT spacer sequence CTCN PAM
caaagugcugagauuacagg

SEQ ID NO: 21146 - RNA, 20 nt, Artificial Sequence
  HTT spacer sequence CTCN PAM
ugcaucagccucccaaagug

SEQ ID NO: 21147 - RNA, 20 nt, Artificial Sequence
  HTT spacer sequence CTCN PAM
aauuccugggcccaagugau

SEQ ID NO: 21148 - RNA, 20 nt, Artificial Sequence
  HTT spacer sequence CTCN PAM
acaaaaaaagaaaaagagga

SEQ ID NO: 21149 - RNA, 20 nt, Artificial Sequence
  HTT spacer sequence CTCN PAM
uuuucuuuuuuuguagagau

SEQ ID NO: 21150 - RNA, 20 nt, Artificial Sequence
  HTT spacer sequence CTCN PAM
uccucuuuuucuuuuuuugu

SEQ ID NO: 21151 - RNA, 20 nt, Artificial Sequence
  HTT spacer sequence CTCN PAM
aacuguacuuaggaccuguc

SEQ ID NO: 21152 - RNA, 20 nt, Artificial Sequence
  HTT spacer sequence CTCN PAM
ucuguauauugguuugggca

SEQ ID NO: 21153 - RNA, 20 nt, Artificial Sequence
  HTT spacer sequence CTCN PAM
aggagccaggcuauuggagc

SEQ ID NO: 21154 - RNA, 20 nt, Artificial Sequence
  HTT spacer sequence CTCN PAM
uggaggaaaacacuuagaac

SEQ ID NO: 21155 - RNA, 20 nt, Artificial Sequence
  HTT spacer sequence CTCN PAM
aauagccuggcuccuggagg

SEQ ID NO: 21156 - RNA, 20 nt, Artificial Sequence
  HTT spacer sequence CTCN PAM
gccacaaggccugcagugcc

SEQ ID NO: 21157 - RNA, 20 nt, Artificial Sequence
  HTT spacer sequence CTCN PAM
cagccauacuguuucacauu

SEQ ID NO: 21158 - RNA, 20 nt, Artificial Sequence
  HTT spacer sequence CTCN PAM
gccauacuguuucacauuca

SEQ ID NO: 21159 - RNA, 20 nt, Artificial Sequence
  HTT spacer sequence CTCN PAM
uaaguuacuuggugaggagg

SEQ ID NO: 21160 - RNA, 20 nt, Artificial Sequence
  HTT spacer sequence CTCN PAM
ccaaguaacuuacgaguuac

SEQ ID NO: 21161 - RNA, 20 nt, Artificial Sequence
  HTT spacer sequence CTCN PAM
ucaccaaguaacuuacgagu

SEQ ID NO: 21162 - RNA, 20 nt, Artificial Sequence
  HTT spacer sequence CTCN PAM
ccuccucaccaaguaacuua

SEQ ID NO: 21163 - RNA, 20 nt, Artificial Sequence
  HTT spacer sequence CTCN PAM
cgcugucccugugaaguccg

SEQ ID NO: 21164 - RNA, 20 nt, Artificial Sequence
  HTT spacer sequence CTCN PAM
gacuucacagggacagcgug

SEQ ID NO: 21165 - RNA, 20 nt, Artificial Sequence
  HTT spacer sequence CTCN PAM
ccccgcuguaaaaccgcagu

SEQ ID NO: 21166 - RNA, 20 nt, Artificial Sequence
  HTT spacer sequence CTCN PAM
cugggcaagacacucccccc

SEQ ID NO: 21167 - RNA, 20 nt, Artificial Sequence
  HTT spacer sequence CTCN PAM
uuccucacugggcaagacac

SEQ ID NO: 21168 - RNA, 20 nt, Artificial Sequence
  HTT spacer sequence CTCN PAM
gcuccuuccucacugggcaa

SEQ ID NO: 21169 - RNA, 20 nt, Artificial Sequence
  HTT spacer sequence CTCN PAM
gagucagauccaaacagugu

SEQ ID NO: 21170 - RNA, 20 nt, Artificial Sequence
  HTT spacer sequence CTCN PAM
gagcuccgcuccuuccucac

SEQ ID NO: 21171 - RNA, 20 nt, Artificial Sequence
  HTT spacer sequence CTCN PAM
ggaaccacgccgugaaccgg

SEQ ID NO: 21172 - RNA, 20 nt, Artificial Sequence
  HTT spacer sequence CTCN PAM
gccugguguuaccuagucca

SEQ ID NO: 21173 - RNA, 20 nt, Artificial Sequence
  HTT spacer sequence CTCN PAM
uagaauacagcuugccauag

SEQ ID NO: 21174 - RNA, 20 nt, Artificial Sequence
  HTT spacer sequence CTCN PAM
auggcaagcuguauucuagg

SEQ ID NO: 21175 - RNA, 20 nt, Artificial Sequence
  HTT spacer sequence CTCN PAM
cgauucacaggugcugacgg

SEQ ID NO: 21176 - RNA, 20 nt, Artificial Sequence
  HTT spacer sequence CTCN PAM
uucucacgauucacaggugc

SEQ ID NO: 21177 - RNA, 20 nt, Artificial Sequence
  HTT spacer sequence CTCN PAM
uuuaccgcaugcucaccuua

SEQ ID NO: 21178 - RNA, 20 nt, Artificial Sequence
  HTT spacer sequence CTCN PAM
ccuuaaacuugcccacccgg

SEQ ID NO: 21179 - RNA, 20 nt, Artificial Sequence
  HTT spacer sequence CTCN PAM
uccuaaaaccgggugggcaa

SEQ ID NO: 21180 - RNA, 20 nt, Artificial Sequence
  HTT spacer sequence CTCN PAM
auggggaacccagccauucu

SEQ ID NO: 21181 - RNA, 20 nt, Artificial Sequence
  HTT spacer sequence CTCN PAM
uccauggggaacccagccau

SEQ ID NO: 21182 - RNA, 20 nt, Artificial Sequence
  HTT spacer sequence CTCN PAM
ccuccauggggaacccagcc

SEQ ID NO: 21183 - RNA, 20 nt, Artificial Sequence
  HTT spacer sequence CTCN PAM
ucucuugcugcguaaaaguc

SEQ ID NO: 21184 - RNA, 20 nt, Artificial Sequence
  HTT spacer sequence CTCN PAM
ugcugcguaaaaguccaggg

SEQ ID NO: 21185 - RNA, 20 nt, Artificial Sequence
  HTT spacer sequence CTCN PAM
gcaaagcccuggacuuuuac

SEQ ID NO: 21186 - RNA, 20 nt, Artificial Sequence
  HTT spacer sequence CTCN PAM
ccacagucagcaaggagaag

SEQ ID NO: 21187 - RNA, 20 nt, Artificial Sequence
  HTT spacer sequence CTCN PAM
acagucagcaaggagaagca

SEQ ID NO: 21188 - RNA, 20 nt, Artificial Sequence
  HTT spacer sequence CTCN PAM
uugcugacuguggagaggcu

SEQ ID NO: 21189 - RNA, 20 nt, Artificial Sequence
  HTT spacer sequence CTCN PAM
agagguggcccccugagccc

SEQ ID NO: 21190 - RNA, 20 nt, Artificial Sequence
  HTT spacer sequence CTCN PAM
ggagacugcuucuccuugcu

SEQ ID NO: 21191 - RNA, 20 nt, Artificial Sequence
  HTT spacer sequence CTCN PAM
gggggccaccucuggagacu

SEQ ID NO: 21192 - RNA, 20 nt, Artificial Sequence
  HTT spacer sequence CTCN PAM
accccugggaaggggccaga

SEQ ID NO: 21193 - RNA, 20 nt, Artificial Sequence
  HTT spacer sequence CTCN PAM
agggccugcugccugugguc

SEQ ID NO: 21194 - RNA, 20 nt, Artificial Sequence
  HTT spacer sequence CTCN PAM
cgggcuccagggccugcugc

SEQ ID NO: 21195 - RNA, 20 nt, Artificial Sequence
  HTT spacer sequence CTCN PAM
cugggccaguggacauggga

SEQ ID NO: 21196 - RNA, 20 nt, Artificial Sequence
  HTT spacer sequence CTCN PAM
gccaugguggccauauaaau

SEQ ID NO: 21197 - RNA, 20 nt, Artificial Sequence
  HTT spacer sequence CTCN PAM
cagccaugguggccauauaa

SEQ ID NO: 21198 - RNA, 20 nt, Artificial Sequence
  HTT spacer sequence CTCN PAM
acacaucaggggcagauggu

SEQ ID NO: 21199 - RNA, 20 nt, Artificial Sequence
  HTT spacer sequence CTCN PAM
uuuuggcuuaugggguggcc

SEQ ID NO: 21200 - RNA, 20 nt, Artificial Sequence
  HTT spacer sequence CTCN PAM
aaaugucacaaauccuuuau

SEQ ID NO: 21201 - RNA, 20 nt, Artificial Sequence
  HTT spacer sequence CTCN PAM
ggcccuuccuccuucccuga

SEQ ID NO: 21202 - RNA, 20 nt, Artificial Sequence
  HTT spacer sequence CTCN PAM
uucccugaagccugguccuc

SEQ ID NO: 21203 - RNA, 20 nt, Artificial Sequence
  HTT spacer sequence CTCN PAM
ggccucaguccugcugggua

SEQ ID NO: 21204 - RNA, 20 nt, Artificial Sequence
  HTT spacer sequence CTCN PAM
guccugcuggguagggugcc

SEQ ID NO: 21205 - RNA, 20 nt, Artificial Sequence
  HTT spacer sequence CTCN PAM
cuaucccuggacucuuucag

SEQ ID NO: 21206 - RNA, 20 nt, Artificial Sequence
  HTT spacer sequence CTCN PAM
aucccuggacucuuucagug

SEQ ID NO: 21207 - RNA, 20 nt, Artificial Sequence
  HTT spacer sequence CTCN PAM
uucaguggaagcacaggucc

SEQ ID NO: 21208 - RNA, 20 nt, Artificial Sequence
  HTT spacer sequence CTCN PAM
agccaagguggggccaccca

SEQ ID NO: 21209 - RNA, 20 nt, Artificial Sequence
  HTT spacer sequence CTCN PAM
aaagugguccuaaacccuuc

SEQ ID NO: 21210 - RNA, 20 nt, Artificial Sequence
  HTT spacer sequence CTCN PAM
ugaggucagcauuuggggcc

SEQ ID NO: 21211 - RNA, 20 nt, Artificial Sequence
  HTT spacer sequence CTCN PAM
ugaggaagacucaaaagugg

SEQ ID NO: 21212 - RNA, 20 nt, Artificial Sequence
  HTT spacer sequence CTCN PAM
gcguuggguggcguccucug

SEQ ID NO: 21213 - RNA, 20 nt, Artificial Sequence
  HTT spacer sequence CTCN PAM
gcguugggugguguccucug

SEQ ID NO: 21214 - RNA, 20 nt, Artificial Sequence
  HTT spacer sequence CTCN PAM
gguggggccaagccacaacc

SEQ ID NO: 21215 - RNA, 20 nt, Artificial Sequence
  HTT spacer sequence CTCN PAM
uuuagugguuaauuccuuug

SEQ ID NO: 21216 - RNA, 20 nt, Artificial Sequence
  HTT spacer sequence CTCN PAM
aguaagcauaauaaaugaag

SEQ ID NO: 21217 - RNA, 20 nt, Artificial Sequence
  HTT spacer sequence CTCN PAM
aagaaaagacacagaacauu

SEQ ID NO: 21218 - RNA, 20 nt, Artificial Sequence
  HTT spacer sequence CTCN PAM
ggaugcuccaagaaaagaca

SEQ ID NO: 21219 - RNA, 20 nt, Artificial Sequence
  HTT spacer sequence CTCN PAM
cuguggucagaugugaccuc

SEQ ID NO: 21220 - RNA, 20 nt, Artificial Sequence
  HTT spacer sequence CTCN PAM
ccaacuacuuauggucauag

SEQ ID NO: 21221 - RNA, 20 nt, Artificial Sequence
  HTT spacer sequence CTCN PAM
aagccuagaauccuaaaaau

SEQ ID NO: 21222 - RNA, 20 nt, Artificial Sequence
  HTT spacer sequence CTCN PAM
gaauuuuuaggauucuaggc

SEQ ID NO: 21223 - RNA, 20 nt, Artificial Sequence
  HTT spacer sequence CTCN PAM
ucuuugcacaucgccuaaca

SEQ ID NO: 21224 - RNA, 20 nt, Artificial Sequence
  HTT spacer sequence CTCN PAM
ugcgaaggucagugugggaa

SEQ ID NO: 21225 - RNA, 20 nt, Artificial Sequence
  HTT spacer sequence CTCN PAM
gcucacucgcauggccucau

SEQ ID NO: 21226 - RNA, 20 nt, Artificial Sequence
  HTT spacer sequence CTCN PAM
cucgcauggccucaugggcu

SEQ ID NO: 21227 - RNA, 20 nt, Artificial Sequence
  HTT spacer sequence CTCN PAM
cauggccucaugggcucugg

SEQ ID NO: 21228 - RNA, 20 nt, Artificial Sequence
  HTT spacer sequence CTCN PAM
ugggcucuggcagcauuuca

SEQ ID NO: 21229 - RNA, 20 nt, Artificial Sequence
  HTT spacer sequence CTCN PAM
ggcagcauuucacccccgcc

SEQ ID NO: 21230 - RNA, 20 nt, Artificial Sequence
  HTT spacer sequence CTCN PAM
ccagaaggacuuggugucac

SEQ ID NO: 21231 - RNA, 20 nt, Artificial Sequence
  HTT spacer sequence CTCN PAM
agaaggacuuggugucacuu

SEQ ID NO: 21232 - RNA, 20 nt, Artificial Sequence
  HTT spacer sequence CTCN PAM
acgucugaagugacaccaag

SEQ ID NO: 21233 - RNA, 20 nt, Artificial Sequence
  HTT spacer sequence CTCN PAM
cuacgucugaagugacacca

SEQ ID NO: 21234 - RNA, 20 nt, Artificial Sequence
  HTT spacer sequence CTCN PAM
gccagaauaguuauaaauca

SEQ ID NO: 21235 - RNA, 20 nt, Artificial Sequence
  HTT spacer sequence CTCN PAM
aggaaagacccagaauucag

SEQ ID NO: 21236 - RNA, 20 nt, Artificial Sequence
  HTT spacer sequence CTCN PAM
uguuugggcccacauuucuu

SEQ ID NO: 21237 - RNA, 20 nt, Artificial Sequence
  HTT spacer sequence CTCN PAM
gagguaacgggaaguacacu

SEQ ID NO: 21238 - RNA, 20 nt, Artificial Sequence
  HTT spacer sequence CTCN PAM
gagggccagaagaaaugugg

SEQ ID NO: 21239 - RNA, 20 nt, Artificial Sequence
  HTT spacer sequence CTCN PAM
agggguccgugagaccugcc

SEQ ID NO: 21240 - RNA, 20 nt, Artificial Sequence
  HTT spacer sequence CTCN PAM
agauauaguguacuucccgu

SEQ ID NO: 21241 - RNA, 20 nt, Artificial Sequence
  HTT spacer sequence CTCN PAM
cggaccccucgagauauagu

SEQ ID NO: 21242 - RNA, 20 nt, Artificial Sequence
  HTT spacer sequence CTCN PAM
ucugcagggcugugaggucu

SEQ ID NO: 21243 - RNA, 20 nt, Artificial Sequence
  HTT spacer sequence CTCN PAM
gcagggcugugaggucuggc

SEQ ID NO: 21244 - RNA, 20 nt, Artificial Sequence
  HTT spacer sequence CTCN PAM
cagcccugcagaggagcugc

SEQ ID NO: 21245 - RNA, 20 nt, Artificial Sequence
  HTT spacer sequence CTCN PAM
cggucagcccagaaagugcu

SEQ ID NO: 21246 - RNA, 20 nt, Artificial Sequence
  HTT spacer sequence CTCN PAM
ccauggagaauguggagucu

SEQ ID NO: 21247 - RNA, 20 nt, Artificial Sequence
  HTT spacer sequence CTCN PAM
auggugaggucccgguaucc

SEQ ID NO: 21248 - RNA, 20 nt, Artificial Sequence
  HTT spacer sequence CTCN PAM
acauucuccauggugagguc

SEQ ID NO: 21249 - RNA, 20 nt, Artificial Sequence
  HTT spacer sequence CTCN PAM
gcagcuucaucuguaaaaug

SEQ ID NO: 21250 - RNA, 20 nt, Artificial Sequence
  HTT spacer sequence CTCN PAM
gucaaucagcccauuuuaca

SEQ ID NO: 21251 - RNA, 20 nt, Artificial Sequence
  HTT spacer sequence CTCN PAM
gaaaaguguuuacaugcuau

SEQ ID NO: 21252 - RNA, 20 nt, Artificial Sequence
  HTT spacer sequence CTCN PAM
ucagaaaaguguuuacaugc

SEQ ID NO: 21253 - RNA, 20 nt, Artificial Sequence
  HTT spacer sequence CTCN PAM
gcaggcucugcuguuguggc

SEQ ID NO: 21254 - RNA, 20 nt, Artificial Sequence
  HTT spacer sequence CTCN PAM
gcuguuguggcaggcuuuug

SEQ ID NO: 21255 - RNA, 20 nt, Artificial Sequence
  HTT spacer sequence CTCN PAM
acaaaagccugccacaacag

SEQ ID NO: 21256 - RNA, 20 nt, Artificial Sequence
  HTT spacer sequence CTCN PAM
gcaucucaacaaaagccugc

SEQ ID NO: 21257 - RNA, 20 nt, Artificial Sequence
  HTT spacer sequence CTCN PAM
gcagccugugcugcuuaaag

SEQ ID NO: 21258 - RNA, 20 nt, Artificial Sequence
  HTT spacer sequence CTCN PAM
gcuuuaagcagcacaggcug

SEQ ID NO: 21259 - RNA, 20 nt, Artificial Sequence
  HTT spacer sequence CTCN PAM
ggcccccucugcuuuaagca

SEQ ID NO: 21260 - RNA, 20 nt, Artificial Sequence
  HTT spacer sequence CTCN PAM
uuccuccgcaagccagcccc

SEQ ID NO: 21261 - RNA, 20 nt, Artificial Sequence
  HTT spacer sequence CTCN PAM
gcaagccagccccucacagg

SEQ ID NO: 21262 - RNA, 20 nt, Artificial Sequence
  HTT spacer sequence CTCN PAM
cagggauucccguaagauuu

SEQ ID NO: 21263 - RNA, 20 nt, Artificial Sequence
  HTT spacer sequence CTCN PAM
cucauacagccuuaccugau

SEQ ID NO: 21264 - RNA, 20 nt, Artificial Sequence
  HTT spacer sequence CTCN PAM
uacagccuuaccugaugggg

SEQ ID NO: 21265 - RNA, 20 nt, Artificial Sequence
  HTT spacer sequence CTCN PAM
gcugacguguuucucuccca

SEQ ID NO: 21266 - RNA, 20 nt, Artificial Sequence
  HTT spacer sequence CTCN PAM
cccacacaccaggccacuug

SEQ ID NO: 21267 - RNA, 20 nt, Artificial Sequence
  HTT spacer sequence CTCN PAM
cacacaccaggccacuugga

SEQ ID NO: 21268 - RNA, 20 nt, Artificial Sequence
  HTT spacer sequence CTCN PAM
aaguggccugguguguggga

SEQ ID NO: 21269 - RNA, 20 nt, Artificial Sequence
  HTT spacer sequence CTCN PAM
uggacgccaucucauugggg

SEQ ID NO: 21270 - RNA, 20 nt, Artificial Sequence
  HTT spacer sequence CTCN PAM
uuggggcucaucacaguauc

SEQ ID NO: 21271 - RNA, 20 nt, Artificial Sequence
  HTT spacer sequence CTCN PAM
ucacaguaucaagguagaag

SEQ ID NO: 21272 - RNA, 20 nt, Artificial Sequence
  HTT spacer sequence CTCN PAM
ucuaccuugauacugugaug

SEQ ID NO: 21273 - RNA, 20 nt, Artificial Sequence
  HTT spacer sequence CTCN PAM
gcuuccucuucuaccuugau

SEQ ID NO: 21274 - RNA, 20 nt, Artificial Sequence
  HTT spacer sequence CTCN PAM
guggccaagggaccuguccc

SEQ ID NO: 21275 - RNA, 20 nt, Artificial Sequence
  HTT spacer sequence CTCN PAM
gccagaccccauggucgugg

SEQ ID NO: 21276 - RNA, 20 nt, Artificial Sequence
  HTT spacer sequence CTCN PAM
guggucagacaggggugcug

SEQ ID NO: 21277 - RNA, 20 nt, Artificial Sequence
  HTT spacer sequence CTCN PAM
ggucacagcagcaccccugu

SEQ ID NO: 21278 - RNA, 20 nt, Artificial Sequence
  HTT spacer sequence CTCN PAM
uuugaagguggugacccugc

SEQ ID NO: 21279 - RNA, 20 nt, Artificial Sequence
  HTT spacer sequence CTCN PAM
uguggagcccagcugugcug

SEQ ID NO: 21280 - RNA, 20 nt, Artificial Sequence
  HTT spacer sequence CTCN PAM
acacgaggggcagggucacc

SEQ ID NO: 21281 - RNA, 20 nt, Artificial Sequence
  HTT spacer sequence CTCN PAM
gccccacagcacagcugggc

SEQ ID NO: 21282 - RNA, 20 nt, Artificial Sequence
  HTT spacer sequence CTCN PAM
ucuuucaggauguggcucug

SEQ ID NO: 21283 - RNA, 20 nt, Artificial Sequence
  HTT spacer sequence CTCN PAM
uucaggauguggcucuguuu

SEQ ID NO: 21284 - RNA, 20 nt, Artificial Sequence
  HTT spacer sequence CTCN PAM
guuuucacugccuaccagcu

SEQ ID NO: 21285 - RNA, 20 nt, Artificial Sequence
  HTT spacer sequence CTCN PAM
ccagccuuccccuugguucu

SEQ ID NO: 21286 - RNA, 20 nt, Artificial Sequence
  HTT spacer sequence CTCN PAM
agccuuccccuugguucuug

SEQ ID NO: 21287 - RNA, 20 nt, Artificial Sequence
  HTT spacer sequence CTCN PAM
aagaaccaaggggaaggcug

SEQ ID NO: 21288 - RNA, 20 nt, Artificial Sequence
  HTT spacer sequence CTCN PAM
guggccagccuauuucucca

SEQ ID NO: 21289 - RNA, 20 nt, Artificial Sequence
  HTT spacer sequence CTCN PAM
auuugcaaccagcaacccug

SEQ ID NO: 21290 - RNA, 20 nt, Artificial Sequence
  HTT spacer sequence CTCN PAM
gaaguuauagccagaaguuu

SEQ ID NO: 21291 - RNA, 20 nt, Artificial Sequence
  HTT spacer sequence CTCN PAM
gugccucagaaguuauagcc

SEQ ID NO: 21292 - RNA, 20 nt, Artificial Sequence
  HTT spacer sequence CTCN PAM
ugccccgcuccgugccucag

SEQ ID NO: 21293 - RNA, 20 nt, Artificial Sequence
  HTT spacer sequence CTCN PAM
cggccagucugggaguggca

SEQ ID NO: 21294 - RNA, 20 nt, Artificial Sequence
  HTT spacer sequence CTCN PAM
gccagucugggaguggcagc

SEQ ID NO: 21295 - RNA, 20 nt, Artificial Sequence
  HTT spacer sequence CTCN PAM
cagacuggccgagagcgcug

SEQ ID NO: 21296 - RNA, 20 nt, Artificial Sequence
  HTT spacer sequence CTCN PAM
uccuccugcaggaagcuucc

SEQ ID NO: 21297 - RNA, 20 nt, Artificial Sequence
  HTT spacer sequence CTCN PAM
uccugcaggaagcuuccucc

SEQ ID NO: 21298 - RNA, 20 nt, Artificial Sequence
  HTT spacer sequence CTCN PAM
ugcaggaagcuuccuccacc

SEQ ID NO: 21299 - RNA, 20 nt, Artificial Sequence
  HTT spacer sequence CTCN PAM
accuuucagcagcccuggag

SEQ ID NO: 21300 - RNA, 20 nt, Artificial Sequence
  HTT spacer sequence CTCN PAM
agggcugcugaaagguggag

SEQ ID NO: 21301 - RNA, 20 nt, Artificial Sequence
  HTT spacer sequence CTCN PAM
augcggcuccagggcugcug

SEQ ID NO: 21302 - RNA, 20 nt, Artificial Sequence
  HTT spacer sequence CTCN PAM
cuucccugcuccaugcggcu

SEQ ID NO: 21303 - RNA, 20 nt, Artificial Sequence
  HTT spacer sequence CTCN PAM
ggcauccuguguguuccagg

SEQ ID NO: 21304 - RNA, 20 nt, Artificial Sequence
  HTT spacer sequence CTCN PAM
cacacagccuggaacacaca

SEQ ID NO: 21305 - RNA, 20 nt, Artificial Sequence
  HTT spacer sequence CTCN PAM
ugccaugccuggcagcugca

SEQ ID NO: 21306 - RNA, 20 nt, Artificial Sequence
  HTT spacer sequence CTCN PAM
ggaaugcagcagggcccugc

SEQ ID NO: 21307 - RNA, 20 nt, Artificial Sequence
  HTT spacer sequence CTCN PAM
cccuguagggauaagcaagu

SEQ ID NO: 21308 - RNA, 20 nt, Artificial Sequence
  HTT spacer sequence CTCN PAM
cuguagggauaagcaagugc

SEQ ID NO: 21309 - RNA, 20 nt, Artificial Sequence
  HTT spacer sequence CTCN PAM
gcaccggcuguccugggcca

SEQ ID NO: 21310 - RNA, 20 nt, Artificial Sequence
  HTT spacer sequence CTCN PAM
ccacacaucccaggccccca

SEQ ID NO: 21311 - RNA, 20 nt, Artificial Sequence
  HTT spacer sequence CTCN PAM
gugacccagcaacuguucug

SEQ ID NO: 21312 - RNA, 20 nt, Artificial Sequence
  HTT spacer sequence CTCN PAM
ugcaaggcgggggacaccag

SEQ ID NO: 21313 - RNA, 20 nt, Artificial Sequence
  HTT spacer sequence CTCN PAM
ggugggccacaaggguuggc

SEQ ID NO: 21314 - RNA, 20 nt, Artificial Sequence
  HTT spacer sequence CTCN PAM
uggaucacaggggcaguggg

SEQ ID NO: 21315 - RNA, 20 nt, Artificial Sequence
  HTT spacer sequence CTCN PAM
ccacugccccugugauccaa

SEQ ID NO: 21316 - RNA, 20 nt, Artificial Sequence
  HTT spacer sequence CTCN PAM
cgaugccucugagcccugcu

SEQ ID NO: 21317 - RNA, 20 nt, Artificial Sequence
  HTT spacer sequence CTCN PAM
gagcccugcucugaggucag

SEQ ID NO: 21318 - RNA, 20 nt, Artificial Sequence
  HTT spacer sequence CTCN PAM
gaggcaucgggagcccuggg

SEQ ID NO: 21319 - RNA, 20 nt, Artificial Sequence
  HTT spacer sequence CTCN PAM
gaggucagccgauguggcuc

SEQ ID NO: 21320 - RNA, 20 nt, Artificial Sequence
  HTT spacer sequence CTCN PAM
gagcagggcucagaggcauc

SEQ ID NO: 21321 - RNA, 20 nt, Artificial Sequence
  HTT spacer sequence CTCN PAM
guccuggcugugaggccuca

SEQ ID NO: 21322 - RNA, 20 nt, Artificial Sequence
  HTT spacer sequence CTCN PAM
cagccaggacugagccacau

SEQ ID NO: 21323 - RNA, 20 nt, Artificial Sequence
  HTT spacer sequence CTCN PAM
cgcugcccugauuccauuug

SEQ ID NO: 21324 - RNA, 20 nt, Artificial Sequence
  HTT spacer sequence CTCN PAM
ucagugcgaggcagacagag

SEQ ID NO: 21325 - RNA, 20 nt, Artificial Sequence
  HTT spacer sequence CTCN PAM
gugcgaggcagacagagccc

SEQ ID NO: 21326 - RNA, 20 nt, Artificial Sequence
  HTT spacer sequence CTCN PAM
cacugaggagcaaauggaau

SEQ ID NO: 21327 - RNA, 20 nt, Artificial Sequence
  HTT spacer sequence CTCN PAM
gucugccucgcacugaggag

SEQ ID NO: 21328 - RNA, 20 nt, Artificial Sequence
  HTT spacer sequence CTCN PAM
ucccuaacgggacacugucu

SEQ ID NO: 21329 - RNA, 20 nt, Artificial Sequence
  HTT spacer sequence CTCN PAM
cuaacgggacacugucuacc

SEQ ID NO: 21330 - RNA, 20 nt, Artificial Sequence
  HTT spacer sequence CTCN PAM
cccgagaaccgucagccccg

SEQ ID NO: 21331 - RNA, 20 nt, Artificial Sequence
  HTT spacer sequence CTCN PAM
ggggagaagaaggaaggggu

SEQ ID NO: 21332 - RNA, 20 nt, Artificial Sequence
  HTT spacer sequence CTCN PAM
cggggcugacgguucucggg

SEQ ID NO: 21333 - RNA, 20 nt, Artificial Sequence
  HTT spacer sequence CTCN PAM
guccacaugcccuacccuag

SEQ ID NO: 21334 - RNA, 20 nt, Artificial Sequence
  HTT spacer sequence CTCN PAM
ccacugcuguucccguaucu

SEQ ID NO: 21335 - RNA, 20 nt, Artificial Sequence
  HTT spacer sequence CTCN PAM
accacccugggguuggggac

SEQ ID NO: 21336 - RNA, 20 nt, Artificial Sequence
  HTT spacer sequence CTCN PAM
cggauggggcugacacccaa

SEQ ID NO: 21337 - RNA, 20 nt, Artificial Sequence
  HTT spacer sequence CTCN PAM
gauggggcugacacccaagg

SEQ ID NO: 21338 - RNA, 20 nt, Artificial Sequence
  HTT spacer sequence CTCN PAM
cugcagaagaaccuggaugu

SEQ ID NO: 21339 - RNA, 20 nt, Artificial Sequence
  HTT spacer sequence CTCN PAM
gcagaagaaccuggauguga

SEQ ID NO: 21340 - RNA, 20 nt, Artificial Sequence
  HTT spacer sequence CTCN PAM
ggccugggcauuagauguca

SEQ ID NO: 21341 - RNA, 20 nt, Artificial Sequence
  HTT spacer sequence CTCN PAM
aguccagcuguccccaagcu

SEQ ID NO: 21342 - RNA, 20 nt, Artificial Sequence
  HTT spacer sequence CTCN PAM
uugacccuguggcuccaguc

SEQ ID NO: 21343 - RNA, 20 nt, Artificial Sequence
  HTT spacer sequence CTCN PAM
cccuccuugacccuguggcu

SEQ ID NO: 21344 - RNA, 20 nt, Artificial Sequence
  HTT spacer sequence CTCN PAM
cagcuggguggacuuugcgc

SEQ ID NO: 21345 - RNA, 20 nt, Artificial Sequence
  HTT spacer sequence CTCN PAM
ucugcccaucggagccggcu

SEQ ID NO: 21346 - RNA, 20 nt, Artificial Sequence
  HTT spacer sequence CTCN PAM
gcccaucggagccggcuggc

SEQ ID NO: 21347 - RNA, 20 nt, Artificial Sequence
  HTT spacer sequence CTCN PAM
gaugggcagaggagcugccu

SEQ ID NO: 21348 - RNA, 20 nt, Artificial Sequence
  HTT spacer sequence CTCN PAM
ugccugggaugggggcagaa

SEQ ID NO: 21349 - RNA, 20 nt, Artificial Sequence
  HTT spacer sequence CTCN PAM
ucugcccccaucccaggcaa

SEQ ID NO: 21350 - RNA, 20 nt, Artificial Sequence
  HTT spacer sequence CTCN PAM
accucuucugcccccauccc

SEQ ID NO: 21351 - RNA, 20 nt, Artificial Sequence
  HTT spacer sequence CTCN PAM
gggccccaggucuccaccuc

SEQ ID NO: 21352 - RNA, 20 nt, Artificial Sequence
  HTT spacer sequence CTCN PAM
auuucuguucccauuaaaag

SEQ ID NO: 21353 - RNA, 20 nt, Artificial Sequence
  HTT spacer sequence CTCN PAM
uccuccauuucuguucccau

SEQ ID NO: 21354 - RNA, 20 nt, Artificial Sequence
  HTT spacer sequence CTCN PAM
gucucuuccuccauuucugu

SEQ ID NO: 21355 - RNA, 20 nt, Artificial Sequence
  HTT spacer sequence CTCN PAM
ccgaccccuacugccugccu

SEQ ID NO: 21356 - RNA, 20 nt, Artificial Sequence
  HTT spacer sequence CTCN PAM
ccaggcaggcaguagggguc

SEQ ID NO: 21357 - RNA, 20 nt, Artificial Sequence
  HTT spacer sequence CTCN PAM
gugugggggaagccugggga

SEQ ID NO: 21358 - RNA, 20 nt, Artificial Sequence
  HTT spacer sequence CTCN PAM
cauccccaggcuucccccac

SEQ ID NO: 21359 - RNA, 20 nt, Artificial Sequence
  HTT spacer sequence CTCN PAM
cacauccccaggcuuccccc

SEQ ID NO: 21360 - RNA, 20 nt, Artificial Sequence
  HTT spacer sequence CTCN PAM
caacuuuaaaguuggucuuc

SEQ ID NO: 21361 - RNA, 20 nt, Artificial Sequence
  HTT spacer sequence CTCN PAM
gggcacugcucccaacuuua

SEQ ID NO: 21362 - RNA, 20 nt, Artificial Sequence
  HTT spacer sequence CTCN PAM
gcuuuuugaaaaagaagucc

SEQ ID NO: 21363 - RNA, 20 nt, Artificial Sequence
  HTT spacer sequence CTCN PAM
gaccagcgccuggcggggcg

SEQ ID NO: 21364 - RNA, 20 nt, Artificial Sequence
  HTT spacer sequence CTCN PAM
gacgcucagaccagcgccug

SEQ ID NO: 21365 - RNA, 20 nt, Artificial Sequence
  HTT spacer sequence CTCN PAM
agagggcgggcggcuccagu

SEQ ID NO: 21366 - RNA, 20 nt, Artificial Sequence
  HTT spacer sequence CTCN PAM
ggagcaagcgcaccaucugg

SEQ ID NO: 21367 - RNA, 20 nt, Artificial Sequence
  HTT spacer sequence CTCN PAM
aguggccgccgcgggacggu

SEQ ID NO: 21368 - RNA, 20 nt, Artificial Sequence
  HTT spacer sequence CTCN PAM
ggccccaccgucccgcggcg

SEQ ID NO: 21369 - RNA, 20 nt, Artificial Sequence
  HTT spacer sequence CTCN PAM
cccacccccacgggccccuc

SEQ ID NO: 21370 - RNA, 20 nt, Artificial Sequence
  HTT spacer sequence CTCN PAM
ugcgggcggcucccccaccc

SEQ ID NO: 21371 - RNA, 20 nt, Artificial Sequence
  HTT spacer sequence CTCN PAM
uucuccugcgggcggcuccc

SEQ ID NO: 21372 - RNA, 20 nt, Artificial Sequence
  HTT spacer sequence CTCN PAM
agggccggcgcgggcggggc

SEQ ID NO: 21373 - RNA, 20 nt, Artificial Sequence
  HTT spacer sequence CTCN PAM
uggcccagcccagggcccug

SEQ ID NO: 21374 - RNA, 20 nt, Artificial Sequence
  HTT spacer sequence CTCN PAM
cagggcccugggcugggcca

SEQ ID NO: 21375 - RNA, 20 nt, Artificial Sequence
  HTT spacer sequence CTCN PAM
ccccggcgccccagcccagg

SEQ ID NO: 21376 - RNA, 20 nt, Artificial Sequence
  HTT spacer sequence CTCN PAM
gucaucuucugucaugguuc

SEQ ID NO: 21377 - RNA, 20 nt, Artificial Sequence
  HTT spacer sequence CTCN PAM
accagcgccgccucggucau

SEQ ID NO: 21378 - RNA, 20 nt, Artificial Sequence
  HTT spacer sequence CTCN PAM
cgcuccccccuguccccgca

SEQ ID NO: 21379 - RNA, 20 nt, Artificial Sequence
  HTT spacer sequence CTCN PAM
ccccuguccccgcaguggaa

SEQ ID NO: 21380 - RNA, 20 nt, Artificial Sequence
  HTT spacer sequence CTCN PAM
uccacugcggggacaggggg

SEQ ID NO: 21381 - RNA, 20 nt, Artificial Sequence
  HTT spacer sequence CTCN PAM
ccugccacgggcgacggcuu

SEQ ID NO: 21382 - RNA, 20 nt, Artificial Sequence
  HTT spacer sequence CTCN PAM
guaacccgugucgcuacccc

SEQ ID NO: 21383 - RNA, 20 nt, Artificial Sequence
  HTT spacer sequence CTCN PAM
gguuucccggcggggugaca

SEQ ID NO: 21384 - RNA, 20 nt, Artificial Sequence
  HTT spacer sequence CTCN PAM
cggguuucccggcgggguga

SEQ ID NO: 21385 - RNA, 20 nt, Artificial Sequence
  HTT spacer sequence CTCN PAM
caggggcgccgggggguccg

SEQ ID NO: 21386 - RNA, 20 nt, Artificial Sequence
  HTT spacer sequence CTCN PAM
uuccagcagggcagacugag

SEQ ID NO: 21387 - RNA, 20 nt, Artificial Sequence
  HTT spacer sequence CTCN PAM
gucugcccugcuggaaagag

SEQ ID NO: 21388 - RNA, 20 nt, Artificial Sequence
  HTT spacer sequence CTCN PAM
ggccucagucugcccugcug

SEQ ID NO: 21389 - RNA, 20 nt, Artificial Sequence
  HTT spacer sequence CTCN PAM
gccuacagggccaccaggca

SEQ ID NO: 21390 - RNA, 20 nt, Artificial Sequence
  HTT spacer sequence CTCN PAM
gggccugcguccccuccgcc

SEQ ID NO: 21391 - RNA, 20 nt, Artificial Sequence
  HTT spacer sequence CTCN PAM
gcuggggggcucagggccug

SEQ ID NO: 21392 - RNA, 20 nt, Artificial Sequence
  HTT spacer sequence CTCN PAM
gguauguggggcuuugcuuc

SEQ ID NO: 21393 - RNA, 20 nt, Artificial Sequence
  HTT spacer sequence CTCN PAM
acccucagguauguggggcu

SEQ ID NO: 21394 - RNA, 20 nt, Artificial Sequence
  HTT spacer sequence CTCN PAM
gagcagggcccccgaaccca

SEQ ID NO: 21395 - RNA, 20 nt, Artificial Sequence
  HTT spacer sequence CTCN PAM
gagcguuuccacaagcacag

SEQ ID NO: 21396 - RNA, 20 nt, Artificial Sequence
  HTT spacer sequence CTCN PAM
aggggugcugcguggguuag

SEQ ID NO: 21397 - RNA, 20 nt, Artificial Sequence
  HTT spacer sequence CTCN PAM
caggcagacgagaggcuggg

SEQ ID NO: 21398 - RNA, 20 nt, Artificial Sequence
  HTT spacer sequence CTCN PAM
ucugccugggagggguccag

SEQ ID NO: 21399 - RNA, 20 nt, Artificial Sequence
  HTT spacer sequence CTCN PAM
cgucugccugggaggggucc

SEQ ID NO: 21400 - RNA, 20 nt, Artificial Sequence
  HTT spacer sequence CTCN PAM
gcccugcccuaccgcagccc

SEQ ID NO: 21401 - RNA, 20 nt, Artificial Sequence
  HTT spacer sequence CTCN PAM
gggaggaggcaggggucccc

SEQ ID NO: 21402 - RNA, 20 nt, Artificial Sequence
  HTT spacer sequence CTCN PAM
cagaggacuguucccccagc

SEQ ID NO: 21403 - RNA, 20 nt, Artificial Sequence
  HTT spacer sequence CTCN PAM
ucccagaggacuguuccccc

SEQ ID NO: 21404 - RNA, 20 nt, Artificial Sequence
  HTT spacer sequence CTCN PAM
gggcggggacugggggggga

SEQ ID NO: 21405 - RNA, 20 nt, Artificial Sequence
  HTT spacer sequence CTCN PAM
ccaagcuggggugcuggcuc

SEQ ID NO: 21406 - RNA, 20 nt, Artificial Sequence
  HTT spacer sequence CTCN PAM
augcugacccuccccaagcu

SEQ ID NO: 21407 - RNA, 20 nt, Artificial Sequence
  HTT spacer sequence CTCN PAM
cuacaggcccagcgcugcag

SEQ ID NO: 21408 - RNA, 20 nt, Artificial Sequence
  HTT spacer sequence CTCN PAM
gcccucccuacaggcccagc

SEQ ID NO: 21409 - RNA, 20 nt, Artificial Sequence
  HTT spacer sequence CTCN PAM
agaggacaggugcggcagag

SEQ ID NO: 21410 - RNA, 20 nt, Artificial Sequence
  HTT spacer sequence CTCN PAM
ggagcagcugcaggcccggc

SEQ ID NO: 21411 - RNA, 20 nt, Artificial Sequence
  HTT spacer sequence CTCN PAM
gccgcaccuguccucuggag

SEQ ID NO: 21412 - RNA, 20 nt, Artificial Sequence
  HTT spacer sequence CTCN PAM
gccugugugcauggggggcu

SEQ ID NO: 21413 - RNA, 20 nt, Artificial Sequence
  HTT spacer sequence CTCN PAM
ggcagcccccuggcguacag

SEQ ID NO: 21414 - RNA, 20 nt, Artificial Sequence
  HTT spacer sequence CTCN PAM
aggacgggugucugugacuc

SEQ ID NO: 21415 - RNA, 20 nt, Artificial Sequence
  HTT spacer sequence CTCN PAM
cagggaggguguggggcagg

SEQ ID NO: 21416 - RNA, 20 nt, Artificial Sequence
  HTT spacer sequence CTCN PAM
cugggagucacagacacccg

SEQ ID NO: 21417 - RNA, 20 nt, Artificial Sequence
  HTT spacer sequence CTCN PAM
ugcguccccucugcagggcc

SEQ ID NO: 21418 - RNA, 20 nt, Artificial Sequence
  HTT spacer sequence CTCN PAM
gcagggccucaggugguccu

SEQ ID NO: 21419 - RNA, 20 nt, Artificial Sequence
  HTT spacer sequence CTCN PAM
ggugguccuggaggaaagca

SEQ ID NO: 21420 - RNA, 20 nt, Artificial Sequence
  HTT spacer sequence CTCN PAM
aggaccaccugaggcccugc

SEQ ID NO: 21421 - RNA, 20 nt, Artificial Sequence
  HTT spacer sequence CTCN PAM
gccuccccuugcagggccug

SEQ ID NO: 21422 - RNA, 20 nt, Artificial Sequence
  HTT spacer sequence CTCN PAM
ccuugcagggccuggacugc

SEQ ID NO: 21423 - RNA, 20 nt, Artificial Sequence
  HTT spacer sequence CTCN PAM
acucagcccuccgugcccag

SEQ ID NO: 21424 - RNA, 20 nt, Artificial Sequence
  HTT spacer sequence CTCN PAM
gcccuccgugcccagaccuc

SEQ ID NO: 21425 - RNA, 20 nt, Artificial Sequence
  HTT spacer sequence CTCN PAM
gugcccagaccuccugccug

SEQ ID NO: 21426 - RNA, 20 nt, Artificial Sequence
  HTT spacer sequence CTCN PAM
ugccuggagcugugggggca

SEQ ID NO: 21427 - RNA, 20 nt, Artificial Sequence
  HTT spacer sequence CTCN PAM
aggcaggaggucugggcacg

SEQ ID NO: 21428 - RNA, 20 nt, Artificial Sequence
  HTT spacer sequence CTCN PAM
gucggugcccccacagcucc

SEQ ID NO: 21429 - RNA, 20 nt, Artificial Sequence
  HTT spacer sequence CTCN PAM
caggcucugucggugccccc

SEQ ID NO: 21430 - RNA, 20 nt, Artificial Sequence
  HTT spacer sequence CTCN PAM
ggggcugcaggggaccuggu

SEQ ID NO: 21431 - RNA, 20 nt, Artificial Sequence
  HTT spacer sequence CTCN PAM
gcccagaccccaucccuucc

SEQ ID NO: 21432 - RNA, 20 nt, Artificial Sequence
  HTT spacer sequence CTCN PAM
cucugcccagaccccauccc

SEQ ID NO: 21433 - RNA, 20 nt, Artificial Sequence
  HTT spacer sequence CTCN PAM
cacucugcccagaccccauc

SEQ ID NO: 21434 - RNA, 20 nt, Artificial Sequence
  HTT spacer sequence CTCN PAM
agcccagcaccauccaccaa

SEQ ID NO: 21435 - RNA, 20 nt, Artificial Sequence
  HTT spacer sequence CTCN PAM
agagaggccgcaucccagga

SEQ ID NO: 21436 - RNA, 20 nt, Artificial Sequence
  HTT spacer sequence CTCN PAM
ggagggucugcaccggcucc

SEQ ID NO: 21437 - RNA, 20 nt, Artificial Sequence
  HTT spacer sequence CTCN PAM
cuggagggucugcaccggcu

SEQ ID NO: 21438 - RNA, 20 nt, Artificial Sequence
  HTT spacer sequence CTCN PAM
uugggggcugcugucccggg

SEQ ID NO: 21439 - RNA, 20 nt, Artificial Sequence
  HTT spacer sequence CTCN PAM
ucuuugggggcugcuguccc

SEQ ID NO: 21440 - RNA, 20 nt, Artificial Sequence
  HTT spacer sequence CTCN PAM
cccgacacuccucuuugggg

SEQ ID NO: 21441 - RNA, 20 nt, Artificial Sequence
  HTT spacer sequence CTCN PAM
aacagggacaaagacuucuc

SEQ ID NO: 21442 - RNA, 20 nt, Artificial Sequence
  HTT spacer sequence CTCN PAM
ugggacugucugaugcagaa

SEQ ID NO: 21443 - RNA, 20 nt, Artificial Sequence
  HTT spacer sequence CTCN PAM
agagggugugcucccccggc

SEQ ID NO: 21444 - RNA, 20 nt, Artificial Sequence
  HTT spacer sequence CTCN PAM
ugaggcuggcaggcccugcc

SEQ ID NO: 21445 - RNA, 20 nt, Artificial Sequence
  HTT spacer sequence CTCN PAM
cccggccggugagugccuga

SEQ ID NO: 21446 - RNA, 20 nt, Artificial Sequence
  HTT spacer sequence CTCN PAM
ccggccgggggagcacaccc

SEQ ID NO: 21447 - RNA, 20 nt, Artificial Sequence
  HTT spacer sequence CTCN PAM
ggcacucaccggccggggga

SEQ ID NO: 21448 - RNA, 20 nt, Artificial Sequence
  HTT spacer sequence CTCN PAM
acucaggcacucaccggccg

SEQ ID NO: 21449 - RNA, 20 nt, Artificial Sequence
  HTT spacer sequence CTCN PAM
ugucacuccacucaggcacu

SEQ ID NO: 21450 - RNA, 20 nt, Artificial Sequence
  HTT spacer sequence CTCN PAM
cagauugucccaccuggggg

SEQ ID NO: 21451 - RNA, 20 nt, Artificial Sequence
  HTT spacer sequence CTCN PAM
cgagcgucugcuggguuauc

SEQ ID NO: 21452 - RNA, 20 nt, Artificial Sequence
  HTT spacer sequence CTCN PAM
ggagccaccauguucaccua

SEQ ID NO: 21453 - RNA, 20 nt, Artificial Sequence
  HTT spacer sequence CTCN PAM
acugcgcaggauacgggaua

SEQ ID NO: 21454 - RNA, 20 nt, Artificial Sequence
  HTT spacer sequence CTCN PAM
cacgccagccccagaaggcu

SEQ ID NO: 21455 - RNA, 20 nt, Artificial Sequence
  HTT spacer sequence CTCN PAM
ggguggauguucauuccaag

SEQ ID NO: 21456 - RNA, 20 nt, Artificial Sequence
  HTT spacer sequence CTCN PAM
aggcuuggaaugaacaucca

SEQ ID NO: 21457 - RNA, 20 nt, Artificial Sequence
  HTT spacer sequence CTCN PAM
cuggccugggacccauugcu

SEQ ID NO: 21458 - RNA, 20 nt, Artificial Sequence
  HTT spacer sequence CTCN PAM
agcagcccaggguugaaacu

SEQ ID NO: 21459 - RNA, 20 nt, Artificial Sequence
  HTT spacer sequence CTCN PAM
gggcaaccccacaggguguc

SEQ ID NO: 21460 - RNA, 20 nt, Artificial Sequence
  HTT spacer sequence CTCN PAM
ucugaccgaccucugggcaa

SEQ ID NO: 21461 - RNA, 20 nt, Artificial Sequence
  HTT spacer sequence CTCN PAM
gucccauccccucaucugac

SEQ ID NO: 21462 - RNA, 20 nt, Artificial Sequence
  HTT spacer sequence CTCN PAM
gcucugucccauccccucau

SEQ ID NO: 21463 - RNA, 20 nt, Artificial Sequence
  HTT spacer sequence CTCN PAM
cgcccaccuccccacccuga

SEQ ID NO: 21464 - RNA, 20 nt, Artificial Sequence
  HTT spacer sequence CTCN PAM
ccacccugaccaggccagcc

SEQ ID NO: 21465 - RNA, 20 nt, Artificial Sequence
  HTT spacer sequence CTCN PAM
ucuccgcucagaggcccuga

SEQ ID NO: 21466 - RNA, 20 nt, Artificial Sequence
  HTT spacer sequence CTCN PAM
ccgcucagaggcccugaugc

SEQ ID NO: 21467 - RNA, 20 nt, Artificial Sequence
  HTT spacer sequence CTCN PAM
gcucagaggcccugaugccu

SEQ ID NO: 21468 - RNA, 20 nt, Artificial Sequence
  HTT spacer sequence CTCN PAM
gaggcccugaugccucuucc

SEQ ID NO: 21469 - RNA, 20 nt, Artificial Sequence
  HTT spacer sequence CTCN PAM
gagcggagaggaggugccag

SEQ ID NO: 21470 - RNA, 20 nt, Artificial Sequence
  HTT spacer sequence CTCN PAM
uccccuggccccucauaagc

SEQ ID NO: 21471 - RNA, 20 nt, Artificial Sequence
  HTT spacer sequence CTCN PAM
uaagccucccuagaugcugc

SEQ ID NO: 21472 - RNA, 20 nt, Artificial Sequence
  HTT spacer sequence CTCN PAM
cuagaugcugcccccuuugc

SEQ ID NO: 21473 - RNA, 20 nt, Artificial Sequence
  HTT spacer sequence CTCN PAM
gcgcuggagaccaccucccu

SEQ ID NO: 21474 - RNA, 20 nt, Artificial Sequence
  HTT spacer sequence CTCN PAM
agcgcugagcgggaaggcag

SEQ ID NO: 21475 - RNA, 20 nt, Artificial Sequence
  HTT spacer sequence CTCN PAM
cuuguggaugggcccggcgu

SEQ ID NO: 21476 - RNA, 20 nt, Artificial Sequence
  HTT spacer sequence CTCN PAM
acgccgggcccauccacaag

SEQ ID NO: 21477 - RNA, 20 nt, Artificial Sequence
  HTT spacer sequence CTCN PAM
cuccacgccgggcccaucca

SEQ ID NO: 21478 - RNA, 20 nt, Artificial Sequence
  HTT spacer sequence CTCN PAM
agggcuggggccugcucccu

SEQ ID NO: 21479 - RNA, 20 nt, Artificial Sequence
  HTT spacer sequence CTCN PAM
uccagggcuggggccugcuc

SEQ ID NO: 21480 - RNA, 20 nt, Artificial Sequence
  HTT spacer sequence CTCN PAM
uggugugagggagagaggaa

SEQ ID NO: 21481 - RNA, 20 nt, Artificial Sequence
  HTT spacer sequence CTCN PAM
caccaggagcgcagggucug

SEQ ID NO: 21482 - RNA, 20 nt, Artificial Sequence
  HTT spacer sequence CTCN PAM
cucacaccaggagcgcaggg

SEQ ID NO: 21483 - RNA, 20 nt, Artificial Sequence
  HTT spacer sequence CTCN PAM
cccucacaccaggagcgcag

SEQ ID NO: 21484 - RNA, 20 nt, Artificial Sequence
  HTT spacer sequence CTCN PAM
cucccucacaccaggagcgc

SEQ ID NO: 21485 - RNA, 20 nt, Artificial Sequence
  HTT spacer sequence CTCN PAM
uccuugcguuuuucucaauc

SEQ ID NO: 21486 - RNA, 20 nt, Artificial Sequence
  HTT spacer sequence CTCN PAM
uugcguuuuucucaaucgug

SEQ ID NO: 21487 - RNA, 20 nt, Artificial Sequence
  HTT spacer sequence CTCN PAM
aucgugagcacgucuuucug

SEQ ID NO: 21488 - RNA, 20 nt, Artificial Sequence
  HTT spacer sequence CTCN PAM
cgauugagaaaaacgcaagg

SEQ ID NO: 21489 - RNA, 20 nt, Artificial Sequence
  HTT spacer sequence CTCN PAM
gccacagcgccuggcauggc

SEQ ID NO: 21490 - RNA, 20 nt, Artificial Sequence
  HTT spacer sequence CTCN PAM
gugugggacugcagggugcc

SEQ ID NO: 21491 - RNA, 20 nt, Artificial Sequence
  HTT spacer sequence CTCN PAM
augucuccaccgcguccuca

SEQ ID NO: 21492 - RNA, 20 nt, Artificial Sequence
  HTT spacer sequence CTCN PAM
accgcguccucacugcggaa

SEQ ID NO: 21493 - RNA, 20 nt, Artificial Sequence
  HTT spacer sequence CTCN PAM
cugcggaaugcgugucugcg

SEQ ID NO: 21494 - RNA, 20 nt, Artificial Sequence
  HTT spacer sequence CTCN PAM
cugggcagggccccggggga

SEQ ID NO: 21495 - RNA, 20 nt, Artificial Sequence
  HTT spacer sequence CTCN PAM
gggcagggccccgggggagg

SEQ ID NO: 21496 - RNA, 20 nt, Artificial Sequence
  HTT spacer sequence CTCN PAM
cccggggcccugcccagaga

SEQ ID NO: 21497 - RNA, 20 nt, Artificial Sequence
  HTT spacer sequence CTCN PAM
ucccccggggcccugcccag

SEQ ID NO: 21498 - RNA, 20 nt, Artificial Sequence
  HTT spacer sequence CTCN PAM
cugcugguggcccugcaugc

SEQ ID NO: 21499 - RNA, 20 nt, Artificial Sequence
  HTT spacer sequence CTCN PAM
cuucuuccucccaggugcgg

SEQ ID NO: 21500 - RNA, 20 nt, Artificial Sequence
  HTT spacer sequence CTCN PAM
ucuuccucccaggugcgggg

SEQ ID NO: 21501 - RNA, 20 nt, Artificial Sequence
  HTT spacer sequence CTCN PAM
caggugcgggggcugggggu

SEQ ID NO: 21502 - RNA, 20 nt, Artificial Sequence
  HTT spacer sequence CTCN PAM
ccacccccagcccccgcacc

SEQ ID NO: 21503 - RNA, 20 nt, Artificial Sequence
  HTT spacer sequence CTCN PAM
acaggaugucaagaacacuu

SEQ ID NO: 21504 - RNA, 20 nt, Artificial Sequence
  HTT spacer sequence CTCN PAM
ccacaggaugucaagaacac

SEQ ID NO: 21505 - RNA, 20 nt, Artificial Sequence
  HTT spacer sequence CTCN PAM
agugucuggccuggggccac

SEQ ID NO: 21506 - RNA, 20 nt, Artificial Sequence
  HTT spacer sequence CTCN PAM
gaaaagccaccgggagggcc

SEQ ID NO: 21507 - RNA, 20 nt, Artificial Sequence
  HTT spacer sequence CTCN PAM
cgguggcuuuucugagcugg

SEQ ID NO: 21508 - RNA, 20 nt, Artificial Sequence
  HTT spacer sequence CTCN PAM
ggcccucccgguggcuuuuc

SEQ ID NO: 21509 - RNA, 20 nt, Artificial Sequence
  HTT spacer sequence CTCN PAM
aggacucgggcccucccggu

SEQ ID NO: 21510 - RNA, 20 nt, Artificial Sequence
  HTT spacer sequence CTCN PAM
aagacccugccagcuccagg

SEQ ID NO: 21511 - RNA, 20 nt, Artificial Sequence
  HTT spacer sequence CTCN PAM
gaaacccgagggaucuggcc

SEQ ID NO: 21512 - RNA, 20 nt, Artificial Sequence
  HTT spacer sequence CTCN PAM
gguuucugaguuucagcuuc

SEQ ID NO: 21513 - RNA, 20 nt, Artificial Sequence
  HTT spacer sequence CTCN PAM
gcccagcaguccaugucuug

SEQ ID NO: 21514 - RNA, 20 nt, Artificial Sequence
  HTT spacer sequence CTCN PAM
ccuauccuugcucucggugg

SEQ ID NO: 21515 - RNA, 20 nt, Artificial Sequence
  HTT spacer sequence CTCN PAM
cggugggacugagcccggcc

SEQ ID NO: 21516 - RNA, 20 nt, Artificial Sequence
  HTT spacer sequence CTCN PAM
gugggacugagcccggccug

SEQ ID NO: 21517 - RNA, 20 nt, Artificial Sequence
  HTT spacer sequence CTCN PAM
gucccaccgagagcaaggau

SEQ ID NO: 21518 - RNA, 20 nt, Artificial Sequence
  HTT spacer sequence CTCN PAM
ugcaggccgggcucaguccc

SEQ ID NO: 21519 - RNA, 20 nt, Artificial Sequence
  HTT spacer sequence CTCN PAM
guggggucccuccugcaggc

SEQ ID NO: 21520 - RNA, 20 nt, Artificial Sequence
  HTT spacer sequence CTCN PAM
ugcgccgucuccgugggguc

SEQ ID NO: 21521 - RNA, 20 nt, Artificial Sequence
  HTT spacer sequence CTCN PAM
cggcuccugcgccgucuccg

SEQ ID NO: 21522 - RNA, 20 nt, Artificial Sequence
  HTT spacer sequence CTCN PAM
cggggcaccugccagggggc

SEQ ID NO: 21523 - RNA, 20 nt, Artificial Sequence
  HTT spacer sequence CTCN PAM
ggggcucacggggcaccugc

SEQ ID NO: 21524 - RNA, 20 nt, Artificial Sequence
  HTT spacer sequence CTCN PAM
acagcgccuccgcuaacgag

SEQ ID NO: 21525 - RNA, 20 nt, Artificial Sequence
  HTT spacer sequence CTCN PAM
gcuaacgaggggcugggggu

SEQ ID NO: 21526 - RNA, 20 nt, Artificial Sequence
  HTT spacer sequence CTCN PAM
uuagcggaggcgcuguggag

SEQ ID NO: 21527 - RNA, 20 nt, Artificial Sequence
  HTT spacer sequence CTCN PAM
ggaagggccgacccaguguc

SEQ ID NO: 21528 - RNA, 20 nt, Artificial Sequence
  HTT spacer sequence CTCN PAM
gcucaggaagggccgaccca

SEQ ID NO: 21529 - RNA, 20 nt, Artificial Sequence
  HTT spacer sequence CTCN PAM
uggugguggauuuccugugc

SEQ ID NO: 21530 - RNA, 20 nt, Artificial Sequence
  HTT spacer sequence CTCN PAM
ugccccaacggacuggggcu

SEQ ID NO: 21531 - RNA, 20 nt, Artificial Sequence
  HTT spacer sequence CTCN PAM
gggcugaagaccgggcgugg

SEQ ID NO: 21532 - RNA, 20 nt, Artificial Sequence
  HTT spacer sequence CTCN PAM
ccccauagaaacaucaagaa

SEQ ID NO: 21533 - RNA, 20 nt, Artificial Sequence
  HTT spacer sequence CTCN PAM
ccauagaaacaucaagaaca

SEQ ID NO: 21534 - RNA, 20 nt, Artificial Sequence
  HTT spacer sequence CTCN PAM
gcccccgcgucaggacaggg

SEQ ID NO: 21535 - RNA, 20 nt, Artificial Sequence
  HTT spacer sequence CTCN PAM
gauucccuguccugacgcgg

SEQ ID NO: 21536 - RNA, 20 nt, Artificial Sequence
  HTT spacer sequence CTCN PAM
cugauucccuguccugacgc

SEQ ID NO: 21537 - RNA, 20 nt, Artificial Sequence
  HTT spacer sequence CTCN PAM
cagcuccacaugugggagca

SEQ ID NO: 21538 - RNA, 20 nt, Artificial Sequence
  HTT spacer sequence CTCN PAM
gcuccacaugugggagcagu

SEQ ID NO: 21539 - RNA, 20 nt, Artificial Sequence
  HTT spacer sequence CTCN PAM
acaugugggagcagugaccu

SEQ ID NO: 21540 - RNA, 20 nt, Artificial Sequence
  HTT spacer sequence CTCN PAM
cacauguggagcugagagcu

SEQ ID NO: 21541 - RNA, 20 nt, Artificial Sequence
  HTT spacer sequence CTCN PAM
uuccccgccugcguccucgu

SEQ ID NO: 21542 - RNA, 20 nt, Artificial Sequence
  HTT spacer sequence CTCN PAM
ucuacucacagggcucuuga

SEQ ID NO: 21543 - RNA, 20 nt, Artificial Sequence
  HTT spacer sequence CTCN PAM
cagggcucuugagggcaaug

SEQ ID NO: 21544 - RNA, 20 nt, Artificial Sequence
  HTT spacer sequence CTCN PAM
ugagggcaauggagaggugg

SEQ ID NO: 21545 - RNA, 20 nt, Artificial Sequence
  HTT spacer sequence CTCN PAM
agagcccugugaguagacga

SEQ ID NO: 21546 - RNA, 20 nt, Artificial Sequence
  HTT spacer sequence CTCN PAM
auugcccucaagagcccugu

SEQ ID NO: 21547 - RNA, 20 nt, Artificial Sequence
  HTT spacer sequence CTCN PAM
ccauugcccucaagagcccu

SEQ ID NO: 21548 - RNA, 20 nt, Artificial Sequence
  HTT spacer sequence CTCN PAM
cgcccaccucuccauugccc

SEQ ID NO: 21549 - RNA, 20 nt, Artificial Sequence
  HTT spacer sequence CTCN PAM
agaugccagggccaggcccu

SEQ ID NO: 21550 - RNA, 20 nt, Artificial Sequence
  HTT spacer sequence CTCN PAM
uccugggcugcccuugguga

SEQ ID NO: 21551 - RNA, 20 nt, Artificial Sequence
  HTT spacer sequence GTCN PAM
uuagggcaauguuuuuuucu

SEQ ID NO: 21552 - RNA, 20 nt, Artificial Sequence
  HTT spacer sequence GTCN PAM
ccccaggaagccgguguaaa

SEQ ID NO: 21553 - RNA, 20 nt, Artificial Sequence
  HTT spacer sequence GTCN PAM
cugccacggguggguuuugc

SEQ ID NO: 21554 - RNA, 20 nt, Artificial Sequence
  HTT spacer sequence GTCN PAM
aaacugcauggcuggcucuc

SEQ ID NO: 21555 - RNA, 20 nt, Artificial Sequence
  HTT spacer sequence GTCN PAM
auggaggggcccccccacuu

SEQ ID NO: 21556 - RNA, 20 nt, Artificial Sequence
  HTT spacer sequence GTCN PAM
ccuacacccccugccucccu

SEQ ID NO: 21557 - RNA, 20 nt, Artificial Sequence
  HTT spacer sequence GTCN PAM
aaaaauauccauucacuuuu

SEQ ID NO: 21558 - RNA, 20 nt, Artificial Sequence
  HTT spacer sequence GTCN PAM
uccuccuucaaacacuugac

SEQ ID NO: 21559 - RNA, 20 nt, Artificial Sequence
  HTT spacer sequence GTCN PAM
aguguuugaaggaggaagac

SEQ ID NO: 21560 - RNA, 20 nt, Artificial Sequence
  HTT spacer sequence GTCN PAM
uuuuucaguuggauugcaaa

SEQ ID NO: 21561 - RNA, 20 nt, Artificial Sequence
  HTT spacer sequence GTCN PAM
cauuuggugaaacgauuacu

SEQ ID NO: 21562 - RNA, 20 nt, Artificial Sequence
  HTT spacer sequence GTCN PAM
ucggauuuuacaugaguccc

SEQ ID NO: 21563 - RNA, 20 nt, Artificial Sequence
  HTT spacer sequence GTCN PAM
agugccuuccugcaggaaag

SEQ ID NO: 21564 - RNA, 20 nt, Artificial Sequence
  HTT spacer sequence GTCN PAM
ccuuuccugcaggaaggcac

SEQ ID NO: 21565 - RNA, 20 nt, Artificial Sequence
  HTT spacer sequence GTCN PAM
ggcaaagucuccuuuccugc

SEQ ID NO: 21566 - RNA, 20 nt, Artificial Sequence
  HTT spacer sequence GTCN PAM
cgcggacaggaguguaaauc

SEQ ID NO: 21567 - RNA, 20 nt, Artificial Sequence
  HTT spacer sequence GTCN PAM
gcgggaccccagagcuggca

SEQ ID NO: 21568 - RNA, 20 nt, Artificial Sequence
  HTT spacer sequence GTCN PAM
ccuugcucgaaccucuacag

SEQ ID NO: 21569 - RNA, 20 nt, Artificial Sequence
  HTT spacer sequence GTCN PAM
ugagaccccauuuguaaaac

SEQ ID NO: 21570 - RNA, 20 nt, Artificial Sequence
  HTT spacer sequence GTCN PAM
caagacaagucaccuugcuc

SEQ ID NO: 21571 - RNA, 20 nt, Artificial Sequence
  HTT spacer sequence GTCN PAM
uuugugaacguuuaaacuau

SEQ ID NO: 21572 - RNA, 20 nt, Artificial Sequence
  HTT spacer sequence GTCN PAM
ucuccuagguccugggcauc

SEQ ID NO: 21573 - RNA, 20 nt, Artificial Sequence
  HTT spacer sequence GTCN PAM
ugggcauccagacaacaaau

SEQ ID NO: 21574 - RNA, 20 nt, Artificial Sequence
  HTT spacer sequence GTCN PAM
ggaugcccaggaccuaggag

SEQ ID NO: 21575 - RNA, 20 nt, Artificial Sequence
  HTT spacer sequence GTCN PAM
ucccauggccugugcccccc

SEQ ID NO: 21576 - RNA, 20 nt, Artificial Sequence
  HTT spacer sequence GTCN PAM
gacauggugaaccccauugc

SEQ ID NO: 21577 - RNA, 20 nt, Artificial Sequence
  HTT spacer sequence GTCN PAM
gacuggcccccaaaccucuc

SEQ ID NO: 21578 - RNA, 20 nt, Artificial Sequence
  HTT spacer sequence GTCN PAM
gcccugguccugacaaccau

SEQ ID NO: 21579 - RNA, 20 nt, Artificial Sequence
  HTT spacer sequence GTCN PAM
ugacaaccauagaggaggca

SEQ ID NO: 21580 - RNA, 20 nt, Artificial Sequence
  HTT spacer sequence GTCN PAM
ggaccagggcugacugcagc

SEQ ID NO: 21581 - RNA, 20 nt, Artificial Sequence
  HTT spacer sequence GTCN PAM
cccugaggaugaaggaugcg

SEQ ID NO: 21582 - RNA, 20 nt, Artificial Sequence
  HTT spacer sequence GTCN PAM
gggucuguucccagcaacca

SEQ ID NO: 21583 - RNA, 20 nt, Artificial Sequence
  HTT spacer sequence GTCN PAM
guucccagcaaccaaguacc

SEQ ID NO: 21584 - RNA, 20 nt, Artificial Sequence
  HTT spacer sequence GTCN PAM
cagugggggccugccacccc

SEQ ID NO: 21585 - RNA, 20 nt, Artificial Sequence
  HTT spacer sequence GTCN PAM
cagaggccaucacagcuucc

SEQ ID NO: 21586 - RNA, 20 nt, Artificial Sequence
  HTT spacer sequence GTCN PAM
guguuucuuggagucucaga

SEQ ID NO: 21587 - RNA, 20 nt, Artificial Sequence
  HTT spacer sequence GTCN PAM
ccgccugcuuacaccaccca

SEQ ID NO: 21588 - RNA, 20 nt, Artificial Sequence
  HTT spacer sequence GTCN PAM
auaauggcagaaccaguggg

SEQ ID NO: 21589 - RNA, 20 nt, Artificial Sequence
  HTT spacer sequence GTCN PAM
uugguugagcuguuacugug

SEQ ID NO: 21590 - RNA, 20 nt, Artificial Sequence
  HTT spacer sequence GTCN PAM
uggacagagaugaucuccuc

SEQ ID NO: 21591 - RNA, 20 nt, Artificial Sequence
  HTT spacer sequence GTCN PAM
aagacucacaguaacagcuc

SEQ ID NO: 21592 - RNA, 20 nt, Artificial Sequence
  HTT spacer sequence GTCN PAM
cagcauccccaccugacacu

SEQ ID NO: 21593 - RNA, 20 nt, Artificial Sequence
  HTT spacer sequence GTCN PAM
gguggggaugcugagaccug

SEQ ID NO: 21594 - RNA, 20 nt, Artificial Sequence
  HTT spacer sequence GTCN PAM
cucccacaccugugccucag

SEQ ID NO: 21595 - RNA, 20 nt, Artificial Sequence
  HTT spacer sequence GTCN PAM
aaauagcauuggagcuccag

SEQ ID NO: 21596 - RNA, 20 nt, Artificial Sequence
  HTT spacer sequence GTCN PAM
ugugucuaaauagcauugga

SEQ ID NO: 21597 - RNA, 20 nt, Artificial Sequence
  HTT spacer sequence GTCN PAM
ucagugguugccggucaugu

SEQ ID NO: 21598 - RNA, 20 nt, Artificial Sequence
  HTT spacer sequence GTCN PAM
acucaaacaaaaccacaccc

SEQ ID NO: 21599 - RNA, 20 nt, Artificial Sequence
  HTT spacer sequence GTCN PAM
cuuaccagcucucagaugug

SEQ ID NO: 21600 - RNA, 20 nt, Artificial Sequence
  HTT spacer sequence GTCN PAM
aacaaaaugaccuaaagaca

SEQ ID NO: 21601 - RNA, 20 nt, Artificial Sequence
  HTT spacer sequence GTCN PAM
uuuuguucgaccuuaagagg

SEQ ID NO: 21602 - RNA, 20 nt, Artificial Sequence
  HTT spacer sequence GTCN PAM
uuaggucauuuuguucgacc

SEQ ID NO: 21603 - RNA, 20 nt, Artificial Sequence
  HTT spacer sequence GTCN PAM
ugccccacaggcugaguguc

SEQ ID NO: 21604 - RNA, 20 nt, Artificial Sequence
  HTT spacer sequence GTCN PAM
gcccugccugcugaguccaa

SEQ ID NO: 21605 - RNA, 20 nt, Artificial Sequence
  HTT spacer sequence GTCN PAM
aaauaucaauuacgugaagc

SEQ ID NO: 21606 - RNA, 20 nt, Artificial Sequence
  HTT spacer sequence GTCN PAM
agagcuucacguaauugaua

SEQ ID NO: 21607 - RNA, 20 nt, Artificial Sequence
  HTT spacer sequence GTCN PAM
gaggcagagagucgagagcu

SEQ ID NO: 21608 - RNA, 20 nt, Artificial Sequence
  HTT spacer sequence GTCN PAM
gguaugguuucuguuaaaug

SEQ ID NO: 21609 - RNA, 20 nt, Artificial Sequence
  HTT spacer sequence GTCN PAM
ucacucagggcucuccuucc

SEQ ID NO: 21610 - RNA, 20 nt, Artificial Sequence
  HTT spacer sequence GTCN PAM
gcgcagggagugaugcucgc

SEQ ID NO: 21611 - RNA, 20 nt, Artificial Sequence
  HTT spacer sequence GTCN PAM
gcagcccaggcucuuaauug

SEQ ID NO: 21612 - RNA, 20 nt, Artificial Sequence
  HTT spacer sequence GTCN PAM
cacacucccccaaccacaaa

SEQ ID NO: 21613 - RNA, 20 nt, Artificial Sequence
  HTT spacer sequence GTCN PAM
cauuuccugcgcuuugcuga

SEQ ID NO: 21614 - RNA, 20 nt, Artificial Sequence
  HTT spacer sequence GTCN PAM
cuuccuaagaggccagggag

SEQ ID NO: 21615 - RNA, 20 nt, Artificial Sequence
  HTT spacer sequence GTCN PAM
gcacugcacucccgcugacc

SEQ ID NO: 21616 - RNA, 20 nt, Artificial Sequence
  HTT spacer sequence GTCN PAM
gcgggagugcagugcggacg

SEQ ID NO: 21617 - RNA, 20 nt, Artificial Sequence
  HTT spacer sequence GTCN PAM
ugccaccccucccagaaagc

SEQ ID NO: 21618 - RNA, 20 nt, Artificial Sequence
  HTT spacer sequence GTCN PAM
cucucagcugugugugguuc

SEQ ID NO: 21619 - RNA, 20 nt, Artificial Sequence
  HTT spacer sequence GTCN PAM
gagcaggcguggcuggcccu

SEQ ID NO: 21620 - RNA, 20 nt, Artificial Sequence
  HTT spacer sequence GTCN PAM
ucccaggacuuccugagccc

SEQ ID NO: 21621 - RNA, 20 nt, Artificial Sequence
  HTT spacer sequence GTCN PAM
ugggaggacgcuuggcagug

SEQ ID NO: 21622 - RNA, 20 nt, Artificial Sequence
  HTT spacer sequence GTCN PAM
uuggccuggcacguuucucu

SEQ ID NO: 21623 - RNA, 20 nt, Artificial Sequence
  HTT spacer sequence GTCN PAM
cuggaacagggucugugcuu

SEQ ID NO: 21624 - RNA, 20 nt, Artificial Sequence
  HTT spacer sequence GTCN PAM
gugcuuggcauggggcaugg

SEQ ID NO: 21625 - RNA, 20 nt, Artificial Sequence
  HTT spacer sequence GTCN PAM
augccccaugccaagcacag

SEQ ID NO: 21626 - RNA, 20 nt, Artificial Sequence
  HTT spacer sequence GTCN PAM
cuacagcacugcguccaugc

SEQ ID NO: 21627 - RNA, 20 nt, Artificial Sequence
  HTT spacer sequence GTCN PAM
ccugggaaacgaauggcugu

SEQ ID NO: 21628 - RNA, 20 nt, Artificial Sequence
  HTT spacer sequence GTCN PAM
aggcacaugccagugacugc

SEQ ID NO: 21629 - RNA, 20 nt, Artificial Sequence
  HTT spacer sequence GTCN PAM
cuggcaugugccuugacuuc

SEQ ID NO: 21630 - RNA, 20 nt, Artificial Sequence
  HTT spacer sequence GTCN PAM
accaagaccccucccacagc

SEQ ID NO: 21631 - RNA, 20 nt, Artificial Sequence
  HTT spacer sequence GTCN PAM
ugguggacacuggggccugg

SEQ ID NO: 21632 - RNA, 20 nt, Artificial Sequence
  HTT spacer sequence GTCN PAM
ucgccccucacccucagcca

SEQ ID NO: 21633 - RNA, 20 nt, Artificial Sequence
  HTT spacer sequence GTCN PAM
uccuuuuggggcuccccacu

SEQ ID NO: 21634 - RNA, 20 nt, Artificial Sequence
  HTT spacer sequence GTCN PAM
cgaagugcagagaugaggcg

SEQ ID NO: 21635 - RNA, 20 nt, Artificial Sequence
  HTT spacer sequence GTCN PAM
ggauauaucuguuugguccc

SEQ ID NO: 21636 - RNA, 20 nt, Artificial Sequence
  HTT spacer sequence GTCN PAM
ugggcccuugaagagagcug

SEQ ID NO: 21637 - RNA, 20 nt, Artificial Sequence
  HTT spacer sequence GTCN PAM
ccugaggguuuucgggguuc

SEQ ID NO: 21638 - RNA, 20 nt, Artificial Sequence
  HTT spacer sequence GTCN PAM
cauacucaguacugcucagu

SEQ ID NO: 21639 - RNA, 20 nt, Artificial Sequence
  HTT spacer sequence GTCN PAM
uggcagguucccacaaaaca

SEQ ID NO: 21640 - RNA, 20 nt, Artificial Sequence
  HTT spacer sequence GTCN PAM
gccugggugccaaccccacu

SEQ ID NO: 21641 - RNA, 20 nt, Artificial Sequence
  HTT spacer sequence GTCN PAM
ucuuucauaaagcacacaca

SEQ ID NO: 21642 - RNA, 20 nt, Artificial Sequence
  HTT spacer sequence GTCN PAM
cucaggcuucucuuggcaaa

SEQ ID NO: 21643 - RNA, 20 nt, Artificial Sequence
  HTT spacer sequence GTCN PAM
ucgcuaaucugggccuggaa

SEQ ID NO: 21644 - RNA, 20 nt, Artificial Sequence
  HTT spacer sequence GTCN PAM
ccccgcuuuguaggagaaca

SEQ ID NO: 21645 - RNA, 20 nt, Artificial Sequence
  HTT spacer sequence GTCN PAM
gggggugcagacaagcgagc

SEQ ID NO: 21646 - RNA, 20 nt, Artificial Sequence
  HTT spacer sequence GTCN PAM
gcacccccagaccguuuuca

SEQ ID NO: 21647 - RNA, 20 nt, Artificial Sequence
  HTT spacer sequence GTCN PAM
auuccuccucaaagauggaa

SEQ ID NO: 21648 - RNA, 20 nt, Artificial Sequence
  HTT spacer sequence GTCN PAM
agguaaguguccaggucccu

SEQ ID NO: 21649 - RNA, 20 nt, Artificial Sequence
  HTT spacer sequence GTCN PAM
aggucccucucccccaugcc

SEQ ID NO: 21650 - RNA, 20 nt, Artificial Sequence
  HTT spacer sequence GTCN PAM
cucucccccaugccgggaau

SEQ ID NO: 21651 - RNA, 20 nt, Artificial Sequence
  HTT spacer sequence GTCN PAM
cuaggaggugagaauucccg

SEQ ID NO: 21652 - RNA, 20 nt, Artificial Sequence
  HTT spacer sequence GTCN PAM
aucaauagaaagucauaacc

SEQ ID NO: 21653 - RNA, 20 nt, Artificial Sequence
  HTT spacer sequence GTCN PAM
uaaccaagcaagaaacacag

SEQ ID NO: 21654 - RNA, 20 nt, Artificial Sequence
  HTT spacer sequence GTCN PAM
cagugcuguguuucuugcuu

SEQ ID NO: 21655 - RNA, 20 nt, Artificial Sequence
  HTT spacer sequence GTCN PAM
ucaucugaaacaaaagucuc

SEQ ID NO: 21656 - RNA, 20 nt, Artificial Sequence
  HTT spacer sequence GTCN PAM
uuucaagagaguuuaugcuu

SEQ ID NO: 21657 - RNA, 20 nt, Artificial Sequence
  HTT spacer sequence GTCN PAM
ugcuuuauugauguugguga

SEQ ID NO: 21658 - RNA, 20 nt, Artificial Sequence
  HTT spacer sequence GTCN PAM
gcuuguccugcuuuauugau

SEQ ID NO: 21659 - RNA, 20 nt, Artificial Sequence
  HTT spacer sequence GTCN PAM
cuuccugggaguguucaaag

SEQ ID NO: 21660 - RNA, 20 nt, Artificial Sequence
  HTT spacer sequence GTCN PAM
ggauaauacuuacaagaucu

SEQ ID NO: 21661 - RNA, 20 nt, Artificial Sequence
  HTT spacer sequence GTCN PAM
uuuaaacaccaauaugauuu

SEQ ID NO: 21662 - RNA, 20 nt, Artificial Sequence
  HTT spacer sequence GTCN PAM
uuuuaauguuaaacuuuugu

SEQ ID NO: 21663 - RNA, 20 nt, Artificial Sequence
  HTT spacer sequence GTCN PAM
cccaggcuugagugcagugg

SEQ ID NO: 21664 - RNA, 20 nt, Artificial Sequence
  HTT spacer sequence GTCN PAM
ugcucugucgcccaggcuug

SEQ ID NO: 21665 - RNA, 20 nt, Artificial Sequence
  HTT spacer sequence GTCN PAM
caaaaaaaaaaaaaaagaaa

SEQ ID NO: 21666 - RNA, 20 nt, Artificial Sequence
  HTT spacer sequence GTCN PAM
cacucuguugcccaggcuag

SEQ ID NO: 21667 - RNA, 20 nt, Artificial Sequence
  HTT spacer sequence GTCN PAM
cagcuacucaggaggauaau

SEQ ID NO: 21668 - RNA, 20 nt, Artificial Sequence
  HTT spacer sequence GTCN PAM
gguggugguggugauuuuuu

SEQ ID NO: 21669 - RNA, 20 nt, Artificial Sequence
  HTT spacer sequence GTCN PAM
cuacaaaaauauuaaaaaau

SEQ ID NO: 21670 - RNA, 20 nt, Artificial Sequence
  HTT spacer sequence GTCN PAM
cacugugaugcccaggcugg

SEQ ID NO: 21671 - RNA, 20 nt, Artificial Sequence
  HTT spacer sequence GTCN PAM
ugaacuccugggcucaagca

SEQ ID NO: 21672 - RNA, 20 nt, Artificial Sequence
  HTT spacer sequence GTCN PAM
cccaccucagccucccaaag

SEQ ID NO: 21673 - RNA, 20 nt, Artificial Sequence
  HTT spacer sequence GTCN PAM
ucaaaacaaaacaaagcugg

SEQ ID NO: 21674 - RNA, 20 nt, Artificial Sequence
  HTT spacer sequence GTCN PAM
uacucccaauuaaccugggg

SEQ ID NO: 21675 - RNA, 20 nt, Artificial Sequence
  HTT spacer sequence GTCN PAM
gguuaaccuuuauaagaucu

SEQ ID NO: 21676 - RNA, 20 nt, Artificial Sequence
  HTT spacer sequence GTCN PAM
uugggagacccggggaccag

SEQ ID NO: 21677 - RNA, 20 nt, Artificial Sequence
  HTT spacer sequence GTCN PAM
cccaaugacugcagaucuua

SEQ ID NO: 21678 - RNA, 20 nt, Artificial Sequence
  HTT spacer sequence GTCN PAM
ccgggucucccaaugacugc

SEQ ID NO: 21679 - RNA, 20 nt, Artificial Sequence
  HTT spacer sequence GTCN PAM
cccuuuuaccuaucagcucu

SEQ ID NO: 21680 - RNA, 20 nt, Artificial Sequence
  HTT spacer sequence GTCN PAM
uagguucuggucucucagau

SEQ ID NO: 21681 - RNA, 20 nt, Artificial Sequence
  HTT spacer sequence GTCN PAM
cucagaucuacuggucaguu

SEQ ID NO: 21682 - RNA, 20 nt, Artificial Sequence
  HTT spacer sequence GTCN PAM
guuugaucaguggauuuauc

SEQ ID NO: 21683 - RNA, 20 nt, Artificial Sequence
  HTT spacer sequence GTCN PAM
ucaguguugucagccacaaa

SEQ ID NO: 21684 - RNA, 20 nt, Artificial Sequence
  HTT spacer sequence GTCN PAM
gccacaaaauaacugcuuug

SEQ ID NO: 21685 - RNA, 20 nt, Artificial Sequence
  HTT spacer sequence GTCN PAM
aaagcaguuauuuuguggcu

SEQ ID NO: 21686 - RNA, 20 nt, Artificial Sequence
  HTT spacer sequence GTCN PAM
aagugccaguuuaugaauuu

SEQ ID NO: 21687 - RNA, 20 nt, Artificial Sequence
  HTT spacer sequence GTCN PAM
caguguaaauucauaaacug

SEQ ID NO: 21688 - RNA, 20 nt, Artificial Sequence
  HTT spacer sequence GTCN PAM
cugaggauaaggggcaucug

SEQ ID NO: 21689 - RNA, 20 nt, Artificial Sequence
  HTT spacer sequence GTCN PAM
cccugaacacacgauccauc

SEQ ID NO: 21690 - RNA, 20 nt, Artificial Sequence
  HTT spacer sequence GTCN PAM
uggcggaacugguaaggaag

SEQ ID NO: 21691 - RNA, 20 nt, Artificial Sequence
  HTT spacer sequence GTCN PAM
aauaguuugagugcacugcu

SEQ ID NO: 21692 - RNA, 20 nt, Artificial Sequence
  HTT spacer sequence GTCN PAM
gaacaucagggaacccucua

SEQ ID NO: 21693 - RNA, 20 nt, Artificial Sequence
  HTT spacer sequence GTCN PAM
cagcuacugggaaggcugag

SEQ ID NO: 21694 - RNA, 20 nt, Artificial Sequence
  HTT spacer sequence GTCN PAM
cacuauguugcccaggcuug

SEQ ID NO: 21695 - RNA, 20 nt, Artificial Sequence
  HTT spacer sequence GTCN PAM
ucuucaaaaaagaaaaaaag

SEQ ID NO: 21696 - RNA, 20 nt, Artificial Sequence
  HTT spacer sequence GTCN PAM
uuuuuucuuuuuugaagaag

SEQ ID NO: 21697 - RNA, 20 nt, Artificial Sequence
  HTT spacer sequence GTCN PAM
cucacugcaucuuaccgcau

SEQ ID NO: 21698 - RNA, 20 nt, Artificial Sequence
  HTT spacer sequence GTCN PAM
cgaggugugagugucuuuga

SEQ ID NO: 21699 - RNA, 20 nt, Artificial Sequence
  HTT spacer sequence GTCN PAM
uugauuuuuacuggauaaau

SEQ ID NO: 21700 - RNA, 20 nt, Artificial Sequence
  HTT spacer sequence GTCN PAM
ggcauuuauccaguaaaaau

SEQ ID NO: 21701 - RNA, 20 nt, Artificial Sequence
  HTT spacer sequence GTCN PAM
cuacuaaaaauacaaaaaau

SEQ ID NO: 21702 - RNA, 20 nt, Artificial Sequence
  HTT spacer sequence GTCN PAM
cgaucuccugaccuugugau

SEQ ID NO: 21703 - RNA, 20 nt, Artificial Sequence
  HTT spacer sequence GTCN PAM
ggagaucgagaccacccggc

SEQ ID NO: 21704 - RNA, 20 nt, Artificial Sequence
  HTT spacer sequence GTCN PAM
cucacgcuuguaaucccagc

SEQ ID NO: 21705 - RNA, 20 nt, Artificial Sequence
  HTT spacer sequence GTCN PAM
cagccucccgaguagcuggg

SEQ ID NO: 21706 - RNA, 20 nt, Artificial Sequence
  HTT spacer sequence GTCN PAM
ggcuggucuugaacgccuga

SEQ ID NO: 21707 - RNA, 20 nt, Artificial Sequence
  HTT spacer sequence GTCN PAM
ugaacgccugaucucaggug

SEQ ID NO: 21708 - RNA, 20 nt, Artificial Sequence
  HTT spacer sequence GTCN PAM
gccuuggccucccaaagugc

SEQ ID NO: 21709 - RNA, 20 nt, Artificial Sequence
  HTT spacer sequence GTCN PAM
uuuuuuuguuguuguugaug

SEQ ID NO: 21710 - RNA, 20 nt, Artificial Sequence
  HTT spacer sequence GTCN PAM
uagcugcuugggaggcugag

SEQ ID NO: 21711 - RNA, 20 nt, Artificial Sequence
  HTT spacer sequence GTCN PAM
cacucugccacccaggcugg

SEQ ID NO: 21712 - RNA, 20 nt, Artificial Sequence
  HTT spacer sequence GTCN PAM
ugaacucccaaccucaagug

SEQ ID NO: 21713 - RNA, 20 nt, Artificial Sequence
  HTT spacer sequence GTCN PAM
uuuuaguagagaugggguuu

SEQ ID NO: 21714 - RNA, 20 nt, Artificial Sequence
  HTT spacer sequence GTCN PAM
cugcaaccucucccuccugg

SEQ ID NO: 21715 - RNA, 20 nt, Artificial Sequence
  HTT spacer sequence GTCN PAM
caaaaaaaaaaauauauaua

SEQ ID NO: 21716 - RNA, 20 nt, Artificial Sequence
  HTT spacer sequence GTCN PAM
ugaaaauguuucccuuuacc

SEQ ID NO: 21717 - RNA, 20 nt, Artificial Sequence
  HTT spacer sequence GTCN PAM
ugaggauauuauccaucauc

SEQ ID NO: 21718 - RNA, 20 nt, Artificial Sequence
  HTT spacer sequence GTCN PAM
auaauuaaagaauugauuuu

SEQ ID NO: 21719 - RNA, 20 nt, Artificial Sequence
  HTT spacer sequence GTCN PAM
guguaucauaccuugauucu

SEQ ID NO: 21720 - RNA, 20 nt, Artificial Sequence
  HTT spacer sequence GTCN PAM
acuuuucuauccuugagcgg

SEQ ID NO: 21721 - RNA, 20 nt, Artificial Sequence
  HTT spacer sequence GTCN PAM
ugcucuguugcccaggcugg

SEQ ID NO: 21722 - RNA, 20 nt, Artificial Sequence
  HTT spacer sequence GTCN PAM
cagccacucaggaggcugag

SEQ ID NO: 21723 - RNA, 20 nt, Artificial Sequence
  HTT spacer sequence GTCN PAM
cuacaaaaaauuuaaaaaua

SEQ ID NO: 21724 - RNA, 20 nt, Artificial Sequence
  HTT spacer sequence GTCN PAM
cccucuguugcucaggcggu

SEQ ID NO: 21725 - RNA, 20 nt, Artificial Sequence
  HTT spacer sequence GTCN PAM
ugaacuccugggcucaagca

SEQ ID NO: 21726 - RNA, 20 nt, Artificial Sequence
  HTT spacer sequence GTCN PAM
gcugccaugcucagccuagu

SEQ ID NO: 21727 - RNA, 20 nt, Artificial Sequence
  HTT spacer sequence GTCN PAM
guuuguguugcuauaaggaa

SEQ ID NO: 21728 - RNA, 20 nt, Artificial Sequence
  HTT spacer sequence GTCN PAM
ucuucaccuugugccguaag

SEQ ID NO: 21729 - RNA, 20 nt, Artificial Sequence
  HTT spacer sequence GTCN PAM
agaugacaugaugagagaaa

SEQ ID NO: 21730 - RNA, 20 nt, Artificial Sequence
  HTT spacer sequence GTCN PAM
ucuggacacacuggguccuc

SEQ ID NO: 21731 - RNA, 20 nt, Artificial Sequence
  HTT spacer sequence GTCN PAM
uuccagcacugagugaguuc

SEQ ID NO: 21732 - RNA, 20 nt, Artificial Sequence
  HTT spacer sequence GTCN PAM
cucaugaauggcuuggugcu

SEQ ID NO: 21733 - RNA, 20 nt, Artificial Sequence
  HTT spacer sequence GTCN PAM
ugagggcaggucccucauga

SEQ ID NO: 21734 - RNA, 20 nt, Artificial Sequence
  HTT spacer sequence GTCN PAM
cagcugcucaggagucugag

SEQ ID NO: 21735 - RNA, 20 nt, Artificial Sequence
  HTT spacer sequence GTCN PAM
gaggugaaaggaucgcuuga

SEQ ID NO: 21736 - RNA, 20 nt, Artificial Sequence
  HTT spacer sequence GTCN PAM
cgaacuucugggcucaagcg

SEQ ID NO: 21737 - RNA, 20 nt, Artificial Sequence
  HTT spacer sequence GTCN PAM
ccaggcuagucucgaacuuc

SEQ ID NO: 21738 - RNA, 20 nt, Artificial Sequence
  HTT spacer sequence GTCN PAM
cugcuaaaaauacaaaaauu

SEQ ID NO: 21739 - RNA, 20 nt, Artificial Sequence
  HTT spacer sequence GTCN PAM
gccaaguagcuggaacuaca

SEQ ID NO: 21740 - RNA, 20 nt, Artificial Sequence
  HTT spacer sequence GTCN PAM
agccuaggcaacagagugac

SEQ ID NO: 21741 - RNA, 20 nt, Artificial Sequence
  HTT spacer sequence GTCN PAM
cucuguugccuaggcuggac

SEQ ID NO: 21742 - RNA, 20 nt, Artificial Sequence
  HTT spacer sequence GTCN PAM
caaaauauguaaauaaaaga

SEQ ID NO: 21743 - RNA, 20 nt, Artificial Sequence
  HTT spacer sequence GTCN PAM
accccagcucuuucuuuuca

SEQ ID NO: 21744 - RNA, 20 nt, Artificial Sequence
  HTT spacer sequence GTCN PAM
cccacucugaagaaacacaa

SEQ ID NO: 21745 - RNA, 20 nt, Artificial Sequence
  HTT spacer sequence GTCN PAM
ucuucucauaucaucacuuu

SEQ ID NO: 21746 - RNA, 20 nt, Artificial Sequence
  HTT spacer sequence GTCN PAM
ucaaguggcgacaggguggg

SEQ ID NO: 21747 - RNA, 20 nt, Artificial Sequence
  HTT spacer sequence GTCN PAM
ccacuugaggaccacugauu

SEQ ID NO: 21748 - RNA, 20 nt, Artificial Sequence
  HTT spacer sequence GTCN PAM
gguugugaagagcuaguugg

SEQ ID NO: 21749 - RNA, 20 nt, Artificial Sequence
  HTT spacer sequence GTCN PAM
uccaacuagcucuucacaac

SEQ ID NO: 21750 - RNA, 20 nt, Artificial Sequence
  HTT spacer sequence GTCN PAM
gcggaugugugggagcugug

SEQ ID NO: 21751 - RNA, 20 nt, Artificial Sequence
  HTT spacer sequence GTCN PAM
gugaauacccaucuuccuuu

SEQ ID NO: 21752 - RNA, 20 nt, Artificial Sequence
  HTT spacer sequence GTCN PAM
augucccuguucuucccucc

SEQ ID NO: 21753 - RNA, 20 nt, Artificial Sequence
  HTT spacer sequence GTCN PAM
cuguucuucccuccugggca

SEQ ID NO: 21754 - RNA, 20 nt, Artificial Sequence
  HTT spacer sequence GTCN PAM
augcggagcagggugcccag

SEQ ID NO: 21755 - RNA, 20 nt, Artificial Sequence
  HTT spacer sequence GTCN PAM
cugagccuaaugauggaagu

SEQ ID NO: 21756 - RNA, 20 nt, Artificial Sequence
  HTT spacer sequence GTCN PAM
ugccgugaaaguucuggugc

SEQ ID NO: 21757 - RNA, 20 nt, Artificial Sequence
  HTT spacer sequence GTCN PAM
ucuccucaucuuuugacuua

SEQ ID NO: 21758 - RNA, 20 nt, Artificial Sequence
  HTT spacer sequence GTCN PAM
ccucaucuuuugacuuacau

SEQ ID NO: 21759 - RNA, 20 nt, Artificial Sequence
  HTT spacer sequence GTCN PAM
aaagaugaggagacgacuua

SEQ ID NO: 21760 - RNA, 20 nt, Artificial Sequence
  HTT spacer sequence GTCN PAM
auguaagucaaaagaugagg

SEQ ID NO: 21761 - RNA, 20 nt, Artificial Sequence
  HTT spacer sequence GTCN PAM
ucagccuggugacuuagcuu

SEQ ID NO: 21762 - RNA, 20 nt, Artificial Sequence
  HTT spacer sequence GTCN PAM
ccaggcugaugacuaaaaau

SEQ ID NO: 21763 - RNA, 20 nt, Artificial Sequence
  HTT spacer sequence GTCN PAM
cuggcuagccucugguuugg

SEQ ID NO: 21764 - RNA, 20 nt, Artificial Sequence
  HTT spacer sequence GTCN PAM
uugggucagaugccucccug

SEQ ID NO: 21765 - RNA, 20 nt, Artificial Sequence
  HTT spacer sequence GTCN PAM
gaugccucccugcugccagg

SEQ ID NO: 21766 - RNA, 20 nt, Artificial Sequence
  HTT spacer sequence GTCN PAM
gaugauggggaccuccccau

SEQ ID NO: 21767 - RNA, 20 nt, Artificial Sequence
  HTT spacer sequence GTCN PAM
ccaucaucagacccucaucc

SEQ ID NO: 21768 - RNA, 20 nt, Artificial Sequence
  HTT spacer sequence GTCN PAM
cccacaccucugcugauggg

SEQ ID NO: 21769 - RNA, 20 nt, Artificial Sequence
  HTT spacer sequence GTCN PAM
ggugugcaaauggcuacuuu

SEQ ID NO: 21770 - RNA, 20 nt, Artificial Sequence
  HTT spacer sequence GTCN PAM
cuuaauuuugagaugcuacc

SEQ ID NO: 21771 - RNA, 20 nt, Artificial Sequence
  HTT spacer sequence GTCN PAM
cugaauaaaagccacuuuca

SEQ ID NO: 21772 - RNA, 20 nt, Artificial Sequence
  HTT spacer sequence GTCN PAM
uuucuggguauugcuguaaa

SEQ ID NO: 21773 - RNA, 20 nt, Artificial Sequence
  HTT spacer sequence GTCN PAM
uuacagcaauacccagaaau

SEQ ID NO: 21774 - RNA, 20 nt, Artificial Sequence
  HTT spacer sequence GTCN PAM
uuuugcauaagguauuaaca

SEQ ID NO: 21775 - RNA, 20 nt, Artificial Sequence
  HTT spacer sequence GTCN PAM
ugaaaaaucacaguaaccag

SEQ ID NO: 21776 - RNA, 20 nt, Artificial Sequence
  HTT spacer sequence GTCN PAM
aauaaaaaguugguaucaaa

SEQ ID NO: 21777 - RNA, 20 nt, Artificial Sequence
  HTT spacer sequence GTCN PAM
gcugcuauuaauaaauucaa

SEQ ID NO: 21778 - RNA, 20 nt, Artificial Sequence
  HTT spacer sequence GTCN PAM
cuacauucaggcuccauaca

SEQ ID NO: 21779 - RNA, 20 nt, Artificial Sequence
  HTT spacer sequence GTCN PAM
caugacagagcagggauaug

SEQ ID NO: 21780 - RNA, 20 nt, Artificial Sequence
  HTT spacer sequence GTCN PAM
ugggacagcacaaauaucua

SEQ ID NO: 21781 - RNA, 20 nt, Artificial Sequence
  HTT spacer sequence GTCN PAM
ggaugccagggcaaguuuca

SEQ ID NO: 21782 - RNA, 20 nt, Artificial Sequence
  HTT spacer sequence GTCN PAM
auuaaauaauauaauuacua

SEQ ID NO: 21783 - RNA, 20 nt, Artificial Sequence
  HTT spacer sequence GTCN PAM
uaaggaaaacuguuauauua

SEQ ID NO: 21784 - RNA, 20 nt, Artificial Sequence
  HTT spacer sequence GTCN PAM
cuguugaauuuuauugaguu

SEQ ID NO: 21785 - RNA, 20 nt, Artificial Sequence
  HTT spacer sequence GTCN PAM
cuaaaauaccugugcccuuu

SEQ ID NO: 21786 - RNA, 20 nt, Artificial Sequence
  HTT spacer sequence GTCN PAM
agggaacacuguuaugugua

SEQ ID NO: 21787 - RNA, 20 nt, Artificial Sequence
  HTT spacer sequence GTCN PAM
ggaauuugagaucagccuga

SEQ ID NO: 21788 - RNA, 20 nt, Artificial Sequence
  HTT spacer sequence GTCN PAM
ggcugaucucaaauuccuga

SEQ ID NO: 21789 - RNA, 20 nt, Artificial Sequence
  HTT spacer sequence GTCN PAM
gucaggcugaucucaaauuc

SEQ ID NO: 21790 - RNA, 20 nt, Artificial Sequence
  HTT spacer sequence GTCN PAM
cgcucuguugcccaggcugg

SEQ ID NO: 21791 - RNA, 20 nt, Artificial Sequence
  HTT spacer sequence GTCN PAM
caaaaaaaaaaaaaaagaaa

SEQ ID NO: 21792 - RNA, 20 nt, Artificial Sequence
  HTT spacer sequence GTCN PAM
ggagaucgagaccauccugg

SEQ ID NO: 21793 - RNA, 20 nt, Artificial Sequence
  HTT spacer sequence GTCN PAM
cgaucuccugaccucgugau

SEQ ID NO: 21794 - RNA, 20 nt, Artificial Sequence
  HTT spacer sequence GTCN PAM
cuacuaacaacgccugucug

SEQ ID NO: 21795 - RNA, 20 nt, Artificial Sequence
  HTT spacer sequence GTCN PAM
gggcgugguggcuccugccu

SEQ ID NO: 21796 - RNA, 20 nt, Artificial Sequence
  HTT spacer sequence GTCN PAM
cagcuacuugggaggcugag

SEQ ID NO: 21797 - RNA, 20 nt, Artificial Sequence
  HTT spacer sequence GTCN PAM
ccaggcuggaaugcaguggc

SEQ ID NO: 21798 - RNA, 20 nt, Artificial Sequence
  HTT spacer sequence GTCN PAM
cgcucugucaccaggcugga

SEQ ID NO: 21799 - RNA, 20 nt, Artificial Sequence
  HTT spacer sequence GTCN PAM
ugccuaccucaaucacaauu

SEQ ID NO: 21800 - RNA, 20 nt, Artificial Sequence
  HTT spacer sequence GTCN PAM
aaaucaauaauacacacuuu

SEQ ID NO: 21801 - RNA, 20 nt, Artificial Sequence
  HTT spacer sequence GTCN PAM
aguccaaaucaauaauacac

SEQ ID NO: 21802 - RNA, 20 nt, Artificial Sequence
  HTT spacer sequence GTCN PAM
auaaugcacccagcaaccag

SEQ ID NO: 21803 - RNA, 20 nt, Artificial Sequence
  HTT spacer sequence GTCN PAM
aaugggaagauggacaugug

SEQ ID NO: 21804 - RNA, 20 nt, Artificial Sequence
  HTT spacer sequence GTCN PAM
aucuucccauuagacacuca

SEQ ID NO: 21805 - RNA, 20 nt, Artificial Sequence
  HTT spacer sequence GTCN PAM
auaggaaguguagaaguugg

SEQ ID NO: 21806 - RNA, 20 nt, Artificial Sequence
  HTT spacer sequence GTCN PAM
ggagaucgagaccauccugg

SEQ ID NO: 21807 - RNA, 20 nt, Artificial Sequence
  HTT spacer sequence GTCN PAM
cgaucuccugaccucgugau

SEQ ID NO: 21808 - RNA, 20 nt, Artificial Sequence
  HTT spacer sequence GTCN PAM
cuacuaaaaauacaaaaaau

SEQ ID NO: 21809 - RNA, 20 nt, Artificial Sequence
  HTT spacer sequence GTCN PAM
cagagcaagacucccucuca

SEQ ID NO: 21810 - RNA, 20 nt, Artificial Sequence
  HTT spacer sequence GTCN PAM
ugcucugugacccaggcugg

SEQ ID NO: 21811 - RNA, 20 nt, Artificial Sequence
  HTT spacer sequence GTCN PAM
cacgcagcuaauuacuacaa

SEQ ID NO: 21812 - RNA, 20 nt, Artificial Sequence
  HTT spacer sequence GTCN PAM
uguaaaggaaaggcggggag

SEQ ID NO: 21813 - RNA, 20 nt, Artificial Sequence
  HTT spacer sequence GTCN PAM
guguguucuugcaaaaucac

SEQ ID NO: 21814 - RNA, 20 nt, Artificial Sequence
  HTT spacer sequence GTCN PAM
uuagcaaaggaucaagcagg

SEQ ID NO: 21815 - RNA, 20 nt, Artificial Sequence
  HTT spacer sequence GTCN PAM
uagguacagugugagggggu

SEQ ID NO: 21816 - RNA, 20 nt, Artificial Sequence
  HTT spacer sequence GTCN PAM
aaacccccucacacuguacc

SEQ ID NO: 21817 - RNA, 20 nt, Artificial Sequence
  HTT spacer sequence GTCN PAM
gcuccccacaugcccuccau

SEQ ID NO: 21818 - RNA, 20 nt, Artificial Sequence
  HTT spacer sequence GTCN PAM
gcaggagguggcagcgucac

SEQ ID NO: 21819 - RNA, 20 nt, Artificial Sequence
  HTT spacer sequence GTCN PAM
ccagcacggggccuuuguug

SEQ ID NO: 21820 - RNA, 20 nt, Artificial Sequence
  HTT spacer sequence GTCN PAM
ccugcauuagccuucauagg

SEQ ID NO: 21821 - RNA, 20 nt, Artificial Sequence
  HTT spacer sequence GTCN PAM
aaucuggguugugcugcugu

SEQ ID NO: 21822 - RNA, 20 nt, Artificial Sequence
  HTT spacer sequence GTCN PAM
ucuuaggguaaaaacacagu

SEQ ID NO: 21823 - RNA, 20 nt, Artificial Sequence
  HTT spacer sequence GTCN PAM
uuuaugauacacacacaccu

SEQ ID NO: 21824 - RNA, 20 nt, Artificial Sequence
  HTT spacer sequence GTCN PAM
cugggugguagaaaaucagu

SEQ ID NO: 21825 - RNA, 20 nt, Artificial Sequence
  HTT spacer sequence GTCN PAM
guauucuccuaugcaaaaau

SEQ ID NO: 21826 - RNA, 20 nt, Artificial Sequence
  HTT spacer sequence GTCN PAM
cuuacauggauauauauaca

SEQ ID NO: 21827 - RNA, 20 nt, Artificial Sequence
  HTT spacer sequence GTCN PAM
acuaaaaauacaaaaaauua

SEQ ID NO: 21828 - RNA, 20 nt, Artificial Sequence
  HTT spacer sequence GTCN PAM
ugaacuccugaccucuugau

SEQ ID NO: 21829 - RNA, 20 nt, Artificial Sequence
  HTT spacer sequence GTCN PAM
ggaguucaagaccagccugg

SEQ ID NO: 21830 - RNA, 20 nt, Artificial Sequence
  HTT spacer sequence GTCN PAM
caaacagugaaacaaaggac

SEQ ID NO: 21831 - RNA, 20 nt, Artificial Sequence
  HTT spacer sequence GTCN PAM
uuuguuucacuguuugagac

SEQ ID NO: 21832 - RNA, 20 nt, Artificial Sequence
  HTT spacer sequence GTCN PAM
ugccugccugugggccaaug

SEQ ID NO: 21833 - RNA, 20 nt, Artificial Sequence
  HTT spacer sequence GTCN PAM
gaaggcuaggacuuggagag

SEQ ID NO: 21834 - RNA, 20 nt, Artificial Sequence
  HTT spacer sequence GTCN PAM
uagccuucagacucucucca

SEQ ID NO: 21835 - RNA, 20 nt, Artificial Sequence
  HTT spacer sequence GTCN PAM
ggguagcucuccaaguccua

SEQ ID NO: 21836 - RNA, 20 nt, Artificial Sequence
  HTT spacer sequence GTCN PAM
gaggaucuccuugauugagg

SEQ ID NO: 21837 - RNA, 20 nt, Artificial Sequence
  HTT spacer sequence GTCN PAM
caacucagccuccucaauca

SEQ ID NO: 21838 - RNA, 20 nt, Artificial Sequence
  HTT spacer sequence GTCN PAM
cgcuccucacuuccagggug

SEQ ID NO: 21839 - RNA, 20 nt, Artificial Sequence
  HTT spacer sequence GTCN PAM
ugcagguuguaagauuuucc

SEQ ID NO: 21840 - RNA, 20 nt, Artificial Sequence
  HTT spacer sequence GTCN PAM
uuucagggcuuguaggcucu

SEQ ID NO: 21841 - RNA, 20 nt, Artificial Sequence
  HTT spacer sequence GTCN PAM
gguccuuucagggcuuguag

SEQ ID NO: 21842 - RNA, 20 nt, Artificial Sequence
  HTT spacer sequence GTCN PAM
ugggccauaggaggguuguu

SEQ ID NO: 21843 - RNA, 20 nt, Artificial Sequence
  HTT spacer sequence GTCN PAM
ggugcuggguauuuuuucau

SEQ ID NO: 21844 - RNA, 20 nt, Artificial Sequence
  HTT spacer sequence GTCN PAM
cuagcucuucuccuccucuc

SEQ ID NO: 21845 - RNA, 20 nt, Artificial Sequence
  HTT spacer sequence GTCN PAM
aagcugcugcugucuggcuc

SEQ ID NO: 21846 - RNA, 20 nt, Artificial Sequence
  HTT spacer sequence GTCN PAM
ggcuccugaacugcagauag

SEQ ID NO: 21847 - RNA, 20 nt, Artificial Sequence
  HTT spacer sequence GTCN PAM
uuucuucccauugucccauc

SEQ ID NO: 21848 - RNA, 20 nt, Artificial Sequence
  HTT spacer sequence GTCN PAM
caucccaucucucucugcac

SEQ ID NO: 21849 - RNA, 20 nt, Artificial Sequence
  HTT spacer sequence GTCN PAM
cuccuugacuucaguggccc

SEQ ID NO: 21850 - RNA, 20 nt, Artificial Sequence
  HTT spacer sequence GTCN PAM
aggagugacucugaggcugc

SEQ ID NO: 21851 - RNA, 20 nt, Artificial Sequence
  HTT spacer sequence GTCN PAM
gccccaugccagccacuggg

SEQ ID NO: 21852 - RNA, 20 nt, Artificial Sequence
  HTT spacer sequence GTCN PAM
gcuucgggggucuccucaag

SEQ ID NO: 21853 - RNA, 20 nt, Artificial Sequence
  HTT spacer sequence GTCN PAM
ccucaaggaggcccucacug

SEQ ID NO: 21854 - RNA, 20 nt, Artificial Sequence
  HTT spacer sequence GTCN PAM
accggguuaaaggguacaga

SEQ ID NO: 21855 - RNA, 20 nt, Artificial Sequence
  HTT spacer sequence GTCN PAM
uauuuauugccuuugucuuu

SEQ ID NO: 21856 - RNA, 20 nt, Artificial Sequence
  HTT spacer sequence GTCN PAM
uugacaguuuucuucaccau

SEQ ID NO: 21857 - RNA, 20 nt, Artificial Sequence
  HTT spacer sequence GTCN PAM
aagacaaaggcaauaaauaa

SEQ ID NO: 21858 - RNA, 20 nt, Artificial Sequence
  HTT spacer sequence GTCN PAM
aggcacugagggcacaaugg

SEQ ID NO: 21859 - RNA, 20 nt, Artificial Sequence
  HTT spacer sequence GTCN PAM
cugagcaugugaugggcuca

SEQ ID NO: 21860 - RNA, 20 nt, Artificial Sequence
  HTT spacer sequence GTCN PAM
uccaggauuuacugagccca

SEQ ID NO: 21861 - RNA, 20 nt, Artificial Sequence
  HTT spacer sequence GTCN PAM
uuucuggcucuuaacauuau

SEQ ID NO: 21862 - RNA, 20 nt, Artificial Sequence
  HTT spacer sequence GTCN PAM
ccaagccuaaaaucauaaug

SEQ ID NO: 21863 - RNA, 20 nt, Artificial Sequence
  HTT spacer sequence GTCN PAM
gauggguauggcuguucugc

SEQ ID NO: 21864 - RNA, 20 nt, Artificial Sequence
  HTT spacer sequence GTCN PAM
uagaaaacagcucccaucac

SEQ ID NO: 21865 - RNA, 20 nt, Artificial Sequence
  HTT spacer sequence GTCN PAM
ucauuuaggcuuuugggauu

SEQ ID NO: 21866 - RNA, 20 nt, Artificial Sequence
  HTT spacer sequence GTCN PAM
uuuaggcuuuugggauuugu

SEQ ID NO: 21867 - RNA, 20 nt, Artificial Sequence
  HTT spacer sequence GTCN PAM
ggcguucucuaggacacugu

SEQ ID NO: 21868 - RNA, 20 nt, Artificial Sequence
  HTT spacer sequence GTCN PAM
uagagaacgccagacuacuc

SEQ ID NO: 21869 - RNA, 20 nt, Artificial Sequence
  HTT spacer sequence GTCN PAM
uaccuccccacaguguccua

SEQ ID NO: 21870 - RNA, 20 nt, Artificial Sequence
  HTT spacer sequence GTCN PAM
gccccugugccccaaacauu

SEQ ID NO: 21871 - RNA, 20 nt, Artificial Sequence
  HTT spacer sequence GTCN PAM
gcaguuuugaucacugguuc

SEQ ID NO: 21872 - RNA, 20 nt, Artificial Sequence
  HTT spacer sequence GTCN PAM
ugcugguauugucauucauu

SEQ ID NO: 21873 - RNA, 20 nt, Artificial Sequence
  HTT spacer sequence GTCN PAM
uucauucuuucaaucacuaa

SEQ ID NO: 21874 - RNA, 20 nt, Artificial Sequence
  HTT spacer sequence GTCN PAM
gcaggaagucuuaagaaugg

SEQ ID NO: 21875 - RNA, 20 nt, Artificial Sequence
  HTT spacer sequence GTCN PAM
uaagaauggagccugggguc

SEQ ID NO: 21876 - RNA, 20 nt, Artificial Sequence
  HTT spacer sequence GTCN PAM
aaaugagagcccucaguggc

SEQ ID NO: 21877 - RNA, 20 nt, Artificial Sequence
  HTT spacer sequence GTCN PAM
uuuugaauaccggugguggg

SEQ ID NO: 21878 - RNA, 20 nt, Artificial Sequence
  HTT spacer sequence GTCN PAM
ccccaucccaccaccgguau

SEQ ID NO: 21879 - RNA, 20 nt, Artificial Sequence
  HTT spacer sequence GTCN PAM
agccggccuuggagaagcuu

SEQ ID NO: 21880 - RNA, 20 nt, Artificial Sequence
  HTT spacer sequence GTCN PAM
ccaucuccacccagaagcuu

SEQ ID NO: 21881 - RNA, 20 nt, Artificial Sequence
  HTT spacer sequence GTCN PAM
gcuggguccacucucuuccc

SEQ ID NO: 21882 - RNA, 20 nt, Artificial Sequence
  HTT spacer sequence GTCN PAM
acucucuucccaccuggcau

SEQ ID NO: 21883 - RNA, 20 nt, Artificial Sequence
  HTT spacer sequence GTCN PAM
ugcagcaaggacacccuaca

SEQ ID NO: 21884 - RNA, 20 nt, Artificial Sequence
  HTT spacer sequence GTCN PAM
uugcugcaagacaugccagg

SEQ ID NO: 21885 - RNA, 20 nt, Artificial Sequence
  HTT spacer sequence GTCN PAM
cuccugccguguaggguguc

SEQ ID NO: 21886 - RNA, 20 nt, Artificial Sequence
  HTT spacer sequence GTCN PAM
uucacacagggcugccucug

SEQ ID NO: 21887 - RNA, 20 nt, Artificial Sequence
  HTT spacer sequence GTCN PAM
uaggauuggguugauacggg

SEQ ID NO: 21888 - RNA, 20 nt, Artificial Sequence
  HTT spacer sequence GTCN PAM
cccccgacacacacacacuu

SEQ ID NO: 21889 - RNA, 20 nt, Artificial Sequence
  HTT spacer sequence GTCN PAM
ggggagacacaggauuuuua

SEQ ID NO: 21890 - RNA, 20 nt, Artificial Sequence
  HTT spacer sequence GTCN PAM
ugggacuuuaaccccauuuc

SEQ ID NO: 21891 - RNA, 20 nt, Artificial Sequence
  HTT spacer sequence GTCN PAM
caagaccagcaagugugugu

SEQ ID NO: 21892 - RNA, 20 nt, Artificial Sequence
  HTT spacer sequence GTCN PAM
cacacaacuggaaauggggu

SEQ ID NO: 21893 - RNA, 20 nt, Artificial Sequence
  HTT spacer sequence GTCN PAM
caaaaaaaaaaaaaaaaaaa

SEQ ID NO: 21894 - RNA, 20 nt, Artificial Sequence
  HTT spacer sequence GTCN PAM
ugcucuauugcccaggcugg

SEQ ID NO: 21895 - RNA, 20 nt, Artificial Sequence
  HTT spacer sequence GTCN PAM
gccuccugaguagcugggau

SEQ ID NO: 21896 - RNA, 20 nt, Artificial Sequence
  HTT spacer sequence GTCN PAM
aaaaaaaaaaagaaagaaaa

SEQ ID NO: 21897 - RNA, 20 nt, Artificial Sequence
  HTT spacer sequence GTCN PAM
ugcccucucacccaggcuag

SEQ ID NO: 21898 - RNA, 20 nt, Artificial Sequence
  HTT spacer sequence GTCN PAM
aggcuguagugagcugugau

SEQ ID NO: 21899 - RNA, 20 nt, Artificial Sequence
  HTT spacer sequence GTCN PAM
cagcuacuagggaggcugag

SEQ ID NO: 21900 - RNA, 20 nt, Artificial Sequence
  HTT spacer sequence GTCN PAM
ugcuauguuacugaggcugg

SEQ ID NO: 21901 - RNA, 20 nt, Artificial Sequence
  HTT spacer sequence GTCN PAM
caaaccucugagcucaaaug

SEQ ID NO: 21902 - RNA, 20 nt, Artificial Sequence
  HTT spacer sequence GTCN PAM
uacaauguggggcaagggga

SEQ ID NO: 21903 - RNA, 20 nt, Artificial Sequence
  HTT spacer sequence GTCN PAM
gggccuuggaugugcagcug

SEQ ID NO: 21904 - RNA, 20 nt, Artificial Sequence
  HTT spacer sequence GTCN PAM
aaauuccagauucaagauaa

SEQ ID NO: 21905 - RNA, 20 nt, Artificial Sequence
  HTT spacer sequence GTCN PAM
gcuguccaaauuccagauuc

SEQ ID NO: 21906 - RNA, 20 nt, Artificial Sequence
  HTT spacer sequence GTCN PAM
gcagaugcaaaccaucuuug

SEQ ID NO: 21907 - RNA, 20 nt, Artificial Sequence
  HTT spacer sequence GTCN PAM
gaaacuacuauucuagaggc

SEQ ID NO: 21908 - RNA, 20 nt, Artificial Sequence
  HTT spacer sequence GTCN PAM
gaaaauugaggcugacaguu

SEQ ID NO: 21909 - RNA, 20 nt, Artificial Sequence
  HTT spacer sequence GTCN PAM
gccucaauuuucagacuguu

SEQ ID NO: 21910 - RNA, 20 nt, Artificial Sequence
  HTT spacer sequence GTCN PAM
ugauccugggcggccccacc

SEQ ID NO: 21911 - RNA, 20 nt, Artificial Sequence
  HTT spacer sequence GTCN PAM
acccccccagccccgugguc

SEQ ID NO: 21912 - RNA, 20 nt, Artificial Sequence
  HTT spacer sequence GTCN PAM
cugggcacuggggugucacu

SEQ ID NO: 21913 - RNA, 20 nt, Artificial Sequence
  HTT spacer sequence GTCN PAM
cugggagggacacgcaggag

SEQ ID NO: 21914 - RNA, 20 nt, Artificial Sequence
  HTT spacer sequence GTCN PAM
cucccagugacaccccagug

SEQ ID NO: 21915 - RNA, 20 nt, Artificial Sequence
  HTT spacer sequence GTCN PAM
cuccugcgugucccucccag

SEQ ID NO: 21916 - RNA, 20 nt, Artificial Sequence
  HTT spacer sequence GTCN PAM
gucccuccugcgugucccuc

SEQ ID NO: 21917 - RNA, 20 nt, Artificial Sequence
  HTT spacer sequence GTCN PAM
acaguaggugcuuaguucuc

SEQ ID NO: 21918 - RNA, 20 nt, Artificial Sequence
  HTT spacer sequence GTCN PAM
aggcccgcgacaacgccagu

SEQ ID NO: 21919 - RNA, 20 nt, Artificial Sequence
  HTT spacer sequence GTCN PAM
cgggccuagacgccgggucc

SEQ ID NO: 21920 - RNA, 20 nt, Artificial Sequence
  HTT spacer sequence GTCN PAM
ucgccccccaggggccucgu

SEQ ID NO: 21921 - RNA, 20 nt, Artificial Sequence
  HTT spacer sequence GTCN PAM
cggggccgcggaggccacgu

SEQ ID NO: 21922 - RNA, 20 nt, Artificial Sequence
  HTT spacer sequence GTCN PAM
gagcugggcguggggcgggg

SEQ ID NO: 21923 - RNA, 20 nt, Artificial Sequence
  HTT spacer sequence GTCN PAM
cgcaauccuggagguccgag

SEQ ID NO: 21924 - RNA, 20 nt, Artificial Sequence
  HTT spacer sequence GTCN PAM
gcccuccuccuggccccgcc

SEQ ID NO: 21925 - RNA, 20 nt, Artificial Sequence
  HTT spacer sequence GTCN PAM
cgcccgcgcccgcccagucc

SEQ ID NO: 21926 - RNA, 20 nt, Artificial Sequence
  HTT spacer sequence GTCN PAM
cgcgggcgggagcgccuggc

SEQ ID NO: 21927 - RNA, 20 nt, Artificial Sequence
  HTT spacer sequence GTCN PAM
agccgccgccucgacccagg

SEQ ID NO: 21928 - RNA, 20 nt, Artificial Sequence
  HTT spacer sequence GTCN PAM
aggcggcggcuugacucggc

SEQ ID NO: 21929 - RNA, 20 nt, Artificial Sequence
  HTT spacer sequence GTCN PAM
cggcgggucucgggggucuc

SEQ ID NO: 21930 - RNA, 20 nt, Artificial Sequence
  HTT spacer sequence GTCN PAM
cgggggucucgcgggggggc

SEQ ID NO: 21931 - RNA, 20 nt, Artificial Sequence
  HTT spacer sequence GTCN PAM
cgcgggggggcggucuccgc

SEQ ID NO: 21932 - RNA, 20 nt, Artificial Sequence
  HTT spacer sequence GTCN PAM
ccgcgucuggaaggggcucg

SEQ ID NO: 21933 - RNA, 20 nt, Artificial Sequence
  HTT spacer sequence GTCN PAM
ggaaggggcucggcgggccu

SEQ ID NO: 21934 - RNA, 20 nt, Artificial Sequence
  HTT spacer sequence GTCN PAM
gggggcucucggcgggucuc

SEQ ID NO: 21935 - RNA, 20 nt, Artificial Sequence
  HTT spacer sequence GTCN PAM
cgggggucucgggggagucu

SEQ ID NO: 21936 - RNA, 20 nt, Artificial Sequence
  HTT spacer sequence GTCN PAM
cgggggagucucgggguccc

SEQ ID NO: 21937 - RNA, 20 nt, Artificial Sequence
  HTT spacer sequence GTCN PAM
cggggucccgacaggucucg

SEQ ID NO: 21938 - RNA, 20 nt, Artificial Sequence
  HTT spacer sequence GTCN PAM
cgacaggucucggcgggucu

SEQ ID NO: 21939 - RNA, 20 nt, Artificial Sequence
  HTT spacer sequence GTCN PAM
ggaccccgagacucccccga

SEQ ID NO: 21940 - RNA, 20 nt, Artificial Sequence
  HTT spacer sequence GTCN PAM
cggcgggucucgggggucuc

SEQ ID NO: 21941 - RNA, 20 nt, Artificial Sequence
  HTT spacer sequence GTCN PAM
cgggggucucgggggagucu

SEQ ID NO: 21942 - RNA, 20 nt, Artificial Sequence
  HTT spacer sequence GTCN PAM
cgggggagucuccggggagu

SEQ ID NO: 21943 - RNA, 20 nt, Artificial Sequence
  HTT spacer sequence GTCN PAM
ccggggagucucaggggucc

SEQ ID NO: 21944 - RNA, 20 nt, Artificial Sequence
  HTT spacer sequence GTCN PAM
caggggucccggcaggucuu

SEQ ID NO: 21945 - RNA, 20 nt, Artificial Sequence
  HTT spacer sequence GTCN PAM
cggcaggucuuggcaggucu

SEQ ID NO: 21946 - RNA, 20 nt, Artificial Sequence
  HTT spacer sequence GTCN PAM
uggcaggucucgggggaguc

SEQ ID NO: 21947 - RNA, 20 nt, Artificial Sequence
  HTT spacer sequence GTCN PAM
cgggggagucucaggguccc

SEQ ID NO: 21948 - RNA, 20 nt, Artificial Sequence
  HTT spacer sequence GTCN PAM
cagggucccggcagguaugg

SEQ ID NO: 21949 - RNA, 20 nt, Artificial Sequence
  HTT spacer sequence GTCN PAM
cggcagguaugggcgggugu

SEQ ID NO: 21950 - RNA, 20 nt, Artificial Sequence
  HTT spacer sequence GTCN PAM
ggggucucgggugcgcagca

SEQ ID NO: 21951 - RNA, 20 nt, Artificial Sequence
  HTT spacer sequence GTCN PAM
cgggugcgcagcagccuccc

SEQ ID NO: 21952 - RNA, 20 nt, Artificial Sequence
  HTT spacer sequence GTCN PAM
uugccaaaggacgcacgggg

SEQ ID NO: 21953 - RNA, 20 nt, Artificial Sequence
  HTT spacer sequence GTCN PAM
uuuggcaaggacacggaggc

SEQ ID NO: 21954 - RNA, 20 nt, Artificial Sequence
  HTT spacer sequence GTCN PAM
cuugccgggggcucaggggu

SEQ ID NO: 21955 - RNA, 20 nt, Artificial Sequence
  HTT spacer sequence GTCN PAM
caccgccucccaccccugag

SEQ ID NO: 21956 - RNA, 20 nt, Artificial Sequence
  HTT spacer sequence GTCN PAM
guuucgcaccccucgcgccc

SEQ ID NO: 21957 - RNA, 20 nt, Artificial Sequence
  HTT spacer sequence GTCN PAM
cguaaaggggccccgccgcg

SEQ ID NO: 21958 - RNA, 20 nt, Artificial Sequence
  HTT spacer sequence GTCN PAM
uguggggagggucgcguaaa

SEQ ID NO: 21959 - RNA, 20 nt, Artificial Sequence
  HTT spacer sequence GTCN PAM
cucacacuucagugugaauc

SEQ ID NO: 21960 - RNA, 20 nt, Artificial Sequence
  HTT spacer sequence GTCN PAM
gagacucucaugggcaacag

SEQ ID NO: 21961 - RNA, 20 nt, Artificial Sequence
  HTT spacer sequence GTCN PAM
cagacgcccggcuaucaguc

SEQ ID NO: 21962 - RNA, 20 nt, Artificial Sequence
  HTT spacer sequence GTCN PAM
cucugccaccccugagauuc

SEQ ID NO: 21963 - RNA, 20 nt, Artificial Sequence
  HTT spacer sequence GTCN PAM
ccgcccccuaacuccuccag

SEQ ID NO: 21964 - RNA, 20 nt, Artificial Sequence
  HTT spacer sequence GTCN PAM
acagaugagcaaacugaggc

SEQ ID NO: 21965 - RNA, 20 nt, Artificial Sequence
  HTT spacer sequence GTCN PAM
ccagugucaacagaugagca

SEQ ID NO: 21966 - RNA, 20 nt, Artificial Sequence
  HTT spacer sequence GTCN PAM
aguggccacacuuaaguccu

SEQ ID NO: 21967 - RNA, 20 nt, Artificial Sequence
  HTT spacer sequence GTCN PAM
uucgaauuggcuguggccag

SEQ ID NO: 21968 - RNA, 20 nt, Artificial Sequence
  HTT spacer sequence GTCN PAM
accccagcagcccacacgga

SEQ ID NO: 21969 - RNA, 20 nt, Artificial Sequence
  HTT spacer sequence GTCN PAM
uccaggcaggcuguccaccc

SEQ ID NO: 21970 - RNA, 20 nt, Artificial Sequence
  HTT spacer sequence GTCN PAM
ccugcaaggccacacacaug

SEQ ID NO: 21971 - RNA, 20 nt, Artificial Sequence
  HTT spacer sequence GTCN PAM
gcccugcaccaacuccauga

SEQ ID NO: 21972 - RNA, 20 nt, Artificial Sequence
  HTT spacer sequence GTCN PAM
aggcucauggaguuggugca

SEQ ID NO: 21973 - RNA, 20 nt, Artificial Sequence
  HTT spacer sequence GTCN PAM
cacagggccugagccaguga

SEQ ID NO: 21974 - RNA, 20 nt, Artificial Sequence
  HTT spacer sequence GTCN PAM
acugucuccucuacguagac

SEQ ID NO: 21975 - RNA, 20 nt, Artificial Sequence
  HTT spacer sequence GTCN PAM
ccucuacguagacaccgucg

SEQ ID NO: 21976 - RNA, 20 nt, Artificial Sequence
  HTT spacer sequence GTCN PAM
acguagaggagacaguggac

SEQ ID NO: 21977 - RNA, 20 nt, Artificial Sequence
  HTT spacer sequence GTCN PAM
aagggcccucuuggagccca

SEQ ID NO: 21978 - RNA, 20 nt, Artificial Sequence
  HTT spacer sequence GTCN PAM
ugccaggaguggagugccug

SEQ ID NO: 21979 - RNA, 20 nt, Artificial Sequence
  HTT spacer sequence GTCN PAM
caggccuccuguccugccag

SEQ ID NO: 21980 - RNA, 20 nt, Artificial Sequence
  HTT spacer sequence GTCN PAM
auccccucucccugccaccc

SEQ ID NO: 21981 - RNA, 20 nt, Artificial Sequence
  HTT spacer sequence GTCN PAM
uccuucugccugcccccucc

SEQ ID NO: 21982 - RNA, 20 nt, Artificial Sequence
  HTT spacer sequence GTCN PAM
aggaacugccagccagggcc

SEQ ID NO: 21983 - RNA, 20 nt, Artificial Sequence
  HTT spacer sequence GTCN PAM
gcaccccucucaccagaugg

SEQ ID NO: 21984 - RNA, 20 nt, Artificial Sequence
  HTT spacer sequence GTCN PAM
ccugucagcaccccucucac

SEQ ID NO: 21985 - RNA, 20 nt, Artificial Sequence
  HTT spacer sequence GTCN PAM
ccaggccuccaggaucaugg

SEQ ID NO: 21986 - RNA, 20 nt, Artificial Sequence
  HTT spacer sequence GTCN PAM
gccucuucaggccagccucc

SEQ ID NO: 21987 - RNA, 20 nt, Artificial Sequence
  HTT spacer sequence GTCN PAM
ucccucugucugccucuuca

SEQ ID NO: 21988 - RNA, 20 nt, Artificial Sequence
  HTT spacer sequence GTCN PAM
augugggcagaaagggccaa

SEQ ID NO: 21989 - RNA, 20 nt, Artificial Sequence
  HTT spacer sequence GTCN PAM
gcuggagcuccccacccccc

SEQ ID NO: 21990 - RNA, 20 nt, Artificial Sequence
  HTT spacer sequence GTCN PAM
gugggccugcuugugugcgu

SEQ ID NO: 21991 - RNA, 20 nt, Artificial Sequence
  HTT spacer sequence GTCN PAM
aggggcccagagagacgaga

SEQ ID NO: 21992 - RNA, 20 nt, Artificial Sequence
  HTT spacer sequence GTCN PAM
cucugggccccuggacuucc

SEQ ID NO: 21993 - RNA, 20 nt, Artificial Sequence
  HTT spacer sequence GTCN PAM
uggaugagaaaacggagggg

SEQ ID NO: 21994 - RNA, 20 nt, Artificial Sequence
  HTT spacer sequence GTCN PAM
guaggggggauggugguggu

SEQ ID NO: 21995 - RNA, 20 nt, Artificial Sequence
  HTT spacer sequence GTCN PAM
ccaccaccaccauccccccu

SEQ ID NO: 21996 - RNA, 20 nt, Artificial Sequence
  HTT spacer sequence GTCN PAM
cugaauaccaagcacauguc

SEQ ID NO: 21997 - RNA, 20 nt, Artificial Sequence
  HTT spacer sequence GTCN PAM
cugagggugcucucccuggu

SEQ ID NO: 21998 - RNA, 20 nt, Artificial Sequence
  HTT spacer sequence GTCN PAM
ucagggccgcuguauguccu

SEQ ID NO: 21999 - RNA, 20 nt, Artificial Sequence
  HTT spacer sequence GTCN PAM
uguuuugggugggggcaggg

SEQ ID NO: 22000 - RNA, 20 nt, Artificial Sequence
  HTT spacer sequence GTCN PAM
cugcccccacccaaaacagg

SEQ ID NO: 22001 - RNA, 20 nt, Artificial Sequence
  HTT spacer sequence GTCN PAM
aaugugggcaggaaccuggg

SEQ ID NO: 22002 - RNA, 20 nt, Artificial Sequence
  HTT spacer sequence GTCN PAM
aucaggaguggccaguguug

SEQ ID NO: 22003 - RNA, 20 nt, Artificial Sequence
  HTT spacer sequence GTCN PAM
uccugcguucuguccucaaa

SEQ ID NO: 22004 - RNA, 20 nt, Artificial Sequence
  HTT spacer sequence GTCN PAM
ucaaaagcucccuugugggg

SEQ ID NO: 22005 - RNA, 20 nt, Artificial Sequence
  HTT spacer sequence GTCN PAM
ccacaagggagcuuuugagg

SEQ ID NO: 22006 - RNA, 20 nt, Artificial Sequence
  HTT spacer sequence GTCN PAM
gugacuauguguggcaggcu

SEQ ID NO: 22007 - RNA, 20 nt, Artificial Sequence
  HTT spacer sequence GTCN PAM
cugaccugggguguccccac

SEQ ID NO: 22008 - RNA, 20 nt, Artificial Sequence
  HTT spacer sequence GTCN PAM
ucucuugaccucaugaucug

SEQ ID NO: 22009 - RNA, 20 nt, Artificial Sequence
  HTT spacer sequence GTCN PAM
agagaggacagagagugagg

SEQ ID NO: 22010 - RNA, 20 nt, Artificial Sequence
  HTT spacer sequence GTCN PAM
uuuccccgccagccugcccu

SEQ ID NO: 22011 - RNA, 20 nt, Artificial Sequence
  HTT spacer sequence GTCN PAM
uaccccagacgcaguggagc

SEQ ID NO: 22012 - RNA, 20 nt, Artificial Sequence
  HTT spacer sequence GTCN PAM
gggguaggacagcucucacc

SEQ ID NO: 22013 - RNA, 20 nt, Artificial Sequence
  HTT spacer sequence GTCN PAM
ggaggagggaucugagccgg

SEQ ID NO: 22014 - RNA, 20 nt, Artificial Sequence
  HTT spacer sequence GTCN PAM
guaccugcauggcugcccgc

SEQ ID NO: 22015 - RNA, 20 nt, Artificial Sequence
  HTT spacer sequence GTCN PAM
gucuguaccugcauggcugc

SEQ ID NO: 22016 - RNA, 20 nt, Artificial Sequence
  HTT spacer sequence GTCN PAM
cccacccucccuaccgcccg

SEQ ID NO: 22017 - RNA, 20 nt, Artificial Sequence
  HTT spacer sequence GTCN PAM
aacuggucucccacccuccc

SEQ ID NO: 22018 - RNA, 20 nt, Artificial Sequence
  HTT spacer sequence GTCN PAM
gcacggccccuucuccuugc

SEQ ID NO: 22019 - RNA, 20 nt, Artificial Sequence
  HTT spacer sequence GTCN PAM
ggacaccgaggggcuggaga

SEQ ID NO: 22020 - RNA, 20 nt, Artificial Sequence
  HTT spacer sequence GTCN PAM
agacagggccaccagaagaa

SEQ ID NO: 22021 - RNA, 20 nt, Artificial Sequence
  HTT spacer sequence GTCN PAM
ccagccccucgguguccaga

SEQ ID NO: 22022 - RNA, 20 nt, Artificial Sequence
  HTT spacer sequence GTCN PAM
cacgugugggcugccuaagu

SEQ ID NO: 22023 - RNA, 20 nt, Artificial Sequence
  HTT spacer sequence GTCN PAM
cagagggggugguagggagc

SEQ ID NO: 22024 - RNA, 20 nt, Artificial Sequence
  HTT spacer sequence GTCN PAM
agugccccagggaagggggc

SEQ ID NO: 22025 - RNA, 20 nt, Artificial Sequence
  HTT spacer sequence GTCN PAM
acccucccgugcacaggcca

SEQ ID NO: 22026 - RNA, 20 nt, Artificial Sequence
  HTT spacer sequence GTCN PAM
cuugcucuuggcaccauccu

SEQ ID NO: 22027 - RNA, 20 nt, Artificial Sequence
  HTT spacer sequence GTCN PAM
ccuggcccguggcugagggc

SEQ ID NO: 22028 - RNA, 20 nt, Artificial Sequence
  HTT spacer sequence GTCN PAM
ggaagugcaauucgccuaca

SEQ ID NO: 22029 - RNA, 20 nt, Artificial Sequence
  HTT spacer sequence GTCN PAM
ucccguuuugcagaucagga

SEQ ID NO: 22030 - RNA, 20 nt, Artificial Sequence
  HTT spacer sequence GTCN PAM
cuggcucuggaccacgcugc

SEQ ID NO: 22031 - RNA, 20 nt, Artificial Sequence
  HTT spacer sequence GTCN PAM
agagccagggacuucuguca

SEQ ID NO: 22032 - RNA, 20 nt, Artificial Sequence
  HTT spacer sequence GTCN PAM
ggggcccggcacggaaccca

SEQ ID NO: 22033 - RNA, 20 nt, Artificial Sequence
  HTT spacer sequence GTCN PAM
cccuugaaggaugaguguag

SEQ ID NO: 22034 - RNA, 20 nt, Artificial Sequence
  HTT spacer sequence GTCN PAM
ccacccgccccgaaccuggg

SEQ ID NO: 22035 - RNA, 20 nt, Artificial Sequence
  HTT spacer sequence GTCN PAM
gacaggaguucgagguggug

SEQ ID NO: 22036 - RNA, 20 nt, Artificial Sequence
  HTT spacer sequence GTCN PAM
gacccaggucuccacccgcc

SEQ ID NO: 22037 - RNA, 20 nt, Artificial Sequence
  HTT spacer sequence GTCN PAM
ggcccugcuugguuucccgg

SEQ ID NO: 22038 - RNA, 20 nt, Artificial Sequence
  HTT spacer sequence GTCN PAM
ccucagggcguuggggccag

SEQ ID NO: 22039 - RNA, 20 nt, Artificial Sequence
  HTT spacer sequence GTCN PAM
caucugguccaucuuuguca

SEQ ID NO: 22040 - RNA, 20 nt, Artificial Sequence
  HTT spacer sequence GTCN PAM
aucuuugucagcuggccucu

SEQ ID NO: 22041 - RNA, 20 nt, Artificial Sequence
  HTT spacer sequence GTCN PAM
gcuggccucugggaagaaug

SEQ ID NO: 22042 - RNA, 20 nt, Artificial Sequence
  HTT spacer sequence GTCN PAM
gcucaagccugcagagggag

SEQ ID NO: 22043 - RNA, 20 nt, Artificial Sequence
  HTT spacer sequence GTCN PAM
gccaggcuggcaggcaacag

SEQ ID NO: 22044 - RNA, 20 nt, Artificial Sequence
  HTT spacer sequence GTCN PAM
gagggcuucagcguccuccu

SEQ ID NO: 22045 - RNA, 20 nt, Artificial Sequence
  HTT spacer sequence GTCN PAM
uccuugugaaauggggugaa

SEQ ID NO: 22046 - RNA, 20 nt, Artificial Sequence
  HTT spacer sequence GTCN PAM
aacucaugggaggccagauc

SEQ ID NO: 22047 - RNA, 20 nt, Artificial Sequence
  HTT spacer sequence GTCN PAM
agggcagggaggcccuagcu

SEQ ID NO: 22048 - RNA, 20 nt, Artificial Sequence
  HTT spacer sequence GTCN PAM
uggguccccaugcccugcag

SEQ ID NO: 22049 - RNA, 20 nt, Artificial Sequence
  HTT spacer sequence GTCN PAM
ccaugcccugcagcccuguc

SEQ ID NO: 22050 - RNA, 20 nt, Artificial Sequence
  HTT spacer sequence GTCN PAM
acuguccugagcuaggcaua

SEQ ID NO: 22051 - RNA, 20 nt, Artificial Sequence
  HTT spacer sequence GTCN PAM
ugagcuaggcauaggggugg

SEQ ID NO: 22052 - RNA, 20 nt, Artificial Sequence
  HTT spacer sequence GTCN PAM
aggggcagccagcagcaagg

SEQ ID NO: 22053 - RNA, 20 nt, Artificial Sequence
  HTT spacer sequence GTCN PAM
uucugggagccuggaaugcu

SEQ ID NO: 22054 - RNA, 20 nt, Artificial Sequence
  HTT spacer sequence GTCN PAM
uuggcuuuuucucagccuug

SEQ ID NO: 22055 - RNA, 20 nt, Artificial Sequence
  HTT spacer sequence GTCN PAM
ggggcaguggugcgccuuua

SEQ ID NO: 22056 - RNA, 20 nt, Artificial Sequence
  HTT spacer sequence GTCN PAM
accacugccccagaggcaga

SEQ ID NO: 22057 - RNA, 20 nt, Artificial Sequence
  HTT spacer sequence GTCN PAM
gcucuugcagugcaugccua

SEQ ID NO: 22058 - RNA, 20 nt, Artificial Sequence
  HTT spacer sequence GTCN PAM
gagggcaggaccgcuggcag

SEQ ID NO: 22059 - RNA, 20 nt, Artificial Sequence
  HTT spacer sequence GTCN PAM
ugcccucugaccuguggccu

SEQ ID NO: 22060 - RNA, 20 nt, Artificial Sequence
  HTT spacer sequence GTCN PAM
ucagcugaaauugcuucuaa

SEQ ID NO: 22061 - RNA, 20 nt, Artificial Sequence
  HTT spacer sequence GTCN PAM
guccugcuuggugcucaggg

SEQ ID NO: 22062 - RNA, 20 nt, Artificial Sequence
  HTT spacer sequence GTCN PAM
ugcuuggugcucaggguacc

SEQ ID NO: 22063 - RNA, 20 nt, Artificial Sequence
  HTT spacer sequence GTCN PAM
auggccaccaugcauguuga

SEQ ID NO: 22064 - RNA, 20 nt, Artificial Sequence
  HTT spacer sequence GTCN PAM
acaugcaugguggccauaga

SEQ ID NO: 22065 - RNA, 20 nt, Artificial Sequence
  HTT spacer sequence GTCN PAM
ccauggaugggucaacaugc

SEQ ID NO: 22066 - RNA, 20 nt, Artificial Sequence
  HTT spacer sequence GTCN PAM
gccugccccuccugcuuggg

SEQ ID NO: 22067 - RNA, 20 nt, Artificial Sequence
  HTT spacer sequence GTCN PAM
gggucgcgucugagagccca

SEQ ID NO: 22068 - RNA, 20 nt, Artificial Sequence
  HTT spacer sequence GTCN PAM
cgucugagagcccaugcccu

SEQ ID NO: 22069 - RNA, 20 nt, Artificial Sequence
  HTT spacer sequence GTCN PAM
gagagcccaugcccuggugg

SEQ ID NO: 22070 - RNA, 20 nt, Artificial Sequence
  HTT spacer sequence GTCN PAM
cagaggaagggugaggggag

SEQ ID NO: 22071 - RNA, 20 nt, Artificial Sequence
  HTT spacer sequence GTCN PAM
cuccccccaccuguguuuaa

SEQ ID NO: 22072 - RNA, 20 nt, Artificial Sequence
  HTT spacer sequence GTCN PAM
gccuggcagcugccgcccag

SEQ ID NO: 22073 - RNA, 20 nt, Artificial Sequence
  HTT spacer sequence GTCN PAM
gauauuaucugauuggaaac

SEQ ID NO: 22074 - RNA, 20 nt, Artificial Sequence
  HTT spacer sequence GTCN PAM
cccacgaaacucuucagguu

SEQ ID NO: 22075 - RNA, 20 nt, Artificial Sequence
  HTT spacer sequence GTCN PAM
cagcgcagcccgcaggggga

SEQ ID NO: 22076 - RNA, 20 nt, Artificial Sequence
  HTT spacer sequence GTCN PAM
cugcugccggguggcaggca

SEQ ID NO: 22077 - RNA, 20 nt, Artificial Sequence
  HTT spacer sequence GTCN PAM
cgguggcccuggcagcggua

SEQ ID NO: 22078 - RNA, 20 nt, Artificial Sequence
  HTT spacer sequence GTCN PAM
ucccuaucuaccgcugccag

SEQ ID NO: 22079 - RNA, 20 nt, Artificial Sequence
  HTT spacer sequence GTCN PAM
guguccccuguccucucccu

SEQ ID NO: 22080 - RNA, 20 nt, Artificial Sequence
  HTT spacer sequence GTCN PAM
ccuguccucucccugaacga

SEQ ID NO: 22081 - RNA, 20 nt, Artificial Sequence
  HTT spacer sequence GTCN PAM
ucucccugaacgaaagugcu

SEQ ID NO: 22082 - RNA, 20 nt, Artificial Sequence
  HTT spacer sequence GTCN PAM
caaagagcuggcaccugagg

SEQ ID NO: 22083 - RNA, 20 nt, Artificial Sequence
  HTT spacer sequence GTCN PAM
aagcaaaaggccggauuucu

SEQ ID NO: 22084 - RNA, 20 nt, Artificial Sequence
  HTT spacer sequence GTCN PAM
ccaugcagggcuguguaccc

SEQ ID NO: 22085 - RNA, 20 nt, Artificial Sequence
  HTT spacer sequence GTCN PAM
gggaggggcguuuccgagag

SEQ ID NO: 22086 - RNA, 20 nt, Artificial Sequence
  HTT spacer sequence GTCN PAM
gcugauggcugggcagauag

SEQ ID NO: 22087 - RNA, 20 nt, Artificial Sequence
  HTT spacer sequence GTCN PAM
gcagagugaguuugaccagg

SEQ ID NO: 22088 - RNA, 20 nt, Artificial Sequence
  HTT spacer sequence GTCN PAM
aacucacucugcugaccacu

SEQ ID NO: 22089 - RNA, 20 nt, Artificial Sequence
  HTT spacer sequence GTCN PAM
ucuuccccucugcccugguc

SEQ ID NO: 22090 - RNA, 20 nt, Artificial Sequence
  HTT spacer sequence GTCN PAM
cuucccccagcucgggggau

SEQ ID NO: 22091 - RNA, 20 nt, Artificial Sequence
  HTT spacer sequence GTCN PAM
cagccugggaacgccugagg

SEQ ID NO: 22092 - RNA, 20 nt, Artificial Sequence
  HTT spacer sequence GTCN PAM
cacggccuggccugguggag

SEQ ID NO: 22093 - RNA, 20 nt, Artificial Sequence
  HTT spacer sequence GTCN PAM
cugcccugcccagagaaggc

SEQ ID NO: 22094 - RNA, 20 nt, Artificial Sequence
  HTT spacer sequence GTCN PAM
ggucaucgaggccuccgggc

SEQ ID NO: 22095 - RNA, 20 nt, Artificial Sequence
  HTT spacer sequence GTCN PAM
ucgaggccuccgggcugauu

SEQ ID NO: 22096 - RNA, 20 nt, Artificial Sequence
  HTT spacer sequence GTCN PAM
uaaucagcccggaggccucg

SEQ ID NO: 22097 - RNA, 20 nt, Artificial Sequence
  HTT spacer sequence GTCN PAM
ugaggcagggcggguacggg

SEQ ID NO: 22098 - RNA, 20 nt, Artificial Sequence
  HTT spacer sequence GTCN PAM
ccacagguggcuccuuccuc

SEQ ID NO: 22099 - RNA, 20 nt, Artificial Sequence
  HTT spacer sequence GTCN PAM
cgccugggagcagcuccucc

SEQ ID NO: 22100 - RNA, 20 nt, Artificial Sequence
  HTT spacer sequence GTCN PAM
cgaggggaaggcauuucaga

SEQ ID NO: 22101 - RNA, 20 nt, Artificial Sequence
  HTT spacer sequence GTCN PAM
cggugagggucccgagggga

SEQ ID NO: 22102 - RNA, 20 nt, Artificial Sequence
  HTT spacer sequence GTCN PAM
agucgcggugagggucccga

SEQ ID NO: 22103 - RNA, 20 nt, Artificial Sequence
  HTT spacer sequence GTCN PAM
gaagcugagcgaaguccagu

SEQ ID NO: 22104 - RNA, 20 nt, Artificial Sequence
  HTT spacer sequence GTCN PAM
ugggugcuggcuucaggaag

SEQ ID NO: 22105 - RNA, 20 nt, Artificial Sequence
  HTT spacer sequence GTCN PAM
cauccucaagaaaaugggaa

SEQ ID NO: 22106 - RNA, 20 nt, Artificial Sequence
  HTT spacer sequence GTCN PAM
ggguggcugugccugccucu

SEQ ID NO: 22107 - RNA, 20 nt, Artificial Sequence
  HTT spacer sequence GTCN PAM
uuucucaaucuucuuccuuc

SEQ ID NO: 22108 - RNA, 20 nt, Artificial Sequence
  HTT spacer sequence GTCN PAM
ccuugaugccagccggcagg

SEQ ID NO: 22109 - RNA, 20 nt, Artificial Sequence
  HTT spacer sequence GTCN PAM
ugagaagcaggggggaccca

SEQ ID NO: 22110 - RNA, 20 nt, Artificial Sequence
  HTT spacer sequence GTCN PAM
ccccugcuucucaggacacc

SEQ ID NO: 22111 - RNA, 20 nt, Artificial Sequence
  HTT spacer sequence GTCN PAM
caaguggguccccccugcuu

SEQ ID NO: 22112 - RNA, 20 nt, Artificial Sequence
  HTT spacer sequence GTCN PAM
ucgagggggccuggguccca

SEQ ID NO: 22113 - RNA, 20 nt, Artificial Sequence
  HTT spacer sequence GTCN PAM
uggcccuuccaguacgaagc

SEQ ID NO: 22114 - RNA, 20 nt, Artificial Sequence
  HTT spacer sequence GTCN PAM
uucacacagccugagcccuc

SEQ ID NO: 22115 - RNA, 20 nt, Artificial Sequence
  HTT spacer sequence GTCN PAM
ggagaccacugccgaacaua

SEQ ID NO: 22116 - RNA, 20 nt, Artificial Sequence
  HTT spacer sequence GTCN PAM
ccagaccccagaguaagcuu

SEQ ID NO: 22117 - RNA, 20 nt, Artificial Sequence
  HTT spacer sequence GTCN PAM
ucuuguggccacugcuugga

SEQ ID NO: 22118 - RNA, 20 nt, Artificial Sequence
  HTT spacer sequence GTCN PAM
ggggaaagggugggggcugc

SEQ ID NO: 22119 - RNA, 20 nt, Artificial Sequence
  HTT spacer sequence GTCN PAM
guggcagcccccacccuuuc

SEQ ID NO: 22120 - RNA, 20 nt, Artificial Sequence
  HTT spacer sequence GTCN PAM
aggcugcagaaggcugggug

SEQ ID NO: 22121 - RNA, 20 nt, Artificial Sequence
  HTT spacer sequence GTCN PAM
ccuccuccacucccacccag

SEQ ID NO: 22122 - RNA, 20 nt, Artificial Sequence
  HTT spacer sequence GTCN PAM
cgucaccuccuccacuccca

SEQ ID NO: 22123 - RNA, 20 nt, Artificial Sequence
  HTT spacer sequence GTCN PAM
gugaccccugcacaggggcu

SEQ ID NO: 22124 - RNA, 20 nt, Artificial Sequence
  HTT spacer sequence GTCN PAM
ccgaccccauccuggucacg

SEQ ID NO: 22125 - RNA, 20 nt, Artificial Sequence
  HTT spacer sequence GTCN PAM
gcugcucccuccccuuucau

SEQ ID NO: 22126 - RNA, 20 nt, Artificial Sequence
  HTT spacer sequence GTCN PAM
caccagggccaaugccaccc

SEQ ID NO: 22127 - RNA, 20 nt, Artificial Sequence
  HTT spacer sequence GTCN PAM
gucccaccagggccaaugcc

SEQ ID NO: 22128 - RNA, 20 nt, Artificial Sequence
  HTT spacer sequence GTCN PAM
ccggcucagucucccuccuc

SEQ ID NO: 22129 - RNA, 20 nt, Artificial Sequence
  HTT spacer sequence GTCN PAM
cccuccuccuuggcuggcuu

SEQ ID NO: 22130 - RNA, 20 nt, Artificial Sequence
  HTT spacer sequence GTCN PAM
gccagaaaagccagccaagg

SEQ ID NO: 22131 - RNA, 20 nt, Artificial Sequence
  HTT spacer sequence GTCN PAM
agagcugccucccuggggag

SEQ ID NO: 22132 - RNA, 20 nt, Artificial Sequence
  HTT spacer sequence GTCN PAM
cuccugaggcugugucccca

SEQ ID NO: 22133 - RNA, 20 nt, Artificial Sequence
  HTT spacer sequence GTCN PAM
ccagaguguccaccgggcug

SEQ ID NO: 22134 - RNA, 20 nt, Artificial Sequence
  HTT spacer sequence GTCN PAM
accgggcugugccaccuccc

SEQ ID NO: 22135 - RNA, 20 nt, Artificial Sequence
  HTT spacer sequence GTCN PAM
gaugcagccugccccugccu

SEQ ID NO: 22136 - RNA, 20 nt, Artificial Sequence
  HTT spacer sequence GTCN PAM
gccccuagggccuccuccug

SEQ ID NO: 22137 - RNA, 20 nt, Artificial Sequence
  HTT spacer sequence GTCN PAM
gcagggccuguaagcaagcc

SEQ ID NO: 22138 - RNA, 20 nt, Artificial Sequence
  HTT spacer sequence GTCN PAM
uacugccacccgagcaguac

SEQ ID NO: 22139 - RNA, 20 nt, Artificial Sequence
  HTT spacer sequence GTCN PAM
ugugaccgccccccccccgg

SEQ ID NO: 22140 - RNA, 20 nt, Artificial Sequence
  HTT spacer sequence GTCN PAM
caggacaagcaccuccacgu

SEQ ID NO: 22141 - RNA, 20 nt, Artificial Sequence
  HTT spacer sequence GTCN PAM
ucagcccggggggggggcgg

SEQ ID NO: 22142 - RNA, 20 nt, Artificial Sequence
  HTT spacer sequence GTCN PAM
cgggcucccgugccaggggu

SEQ ID NO: 22143 - RNA, 20 nt, Artificial Sequence
  HTT spacer sequence GTCN PAM
ggggcuguggugguugggga

SEQ ID NO: 22144 - RNA, 20 nt, Artificial Sequence
  HTT spacer sequence GTCN PAM
ccaaccaccacagccccaga

SEQ ID NO: 22145 - RNA, 20 nt, Artificial Sequence
  HTT spacer sequence GTCN PAM
uuccucagaggggugaaugg

SEQ ID NO: 22146 - RNA, 20 nt, Artificial Sequence
  HTT spacer sequence GTCN PAM
uggggugaccuggccggggg

SEQ ID NO: 22147 - RNA, 20 nt, Artificial Sequence
  HTT spacer sequence GTCN PAM
ccccaagacacccccaaugc

SEQ ID NO: 22148 - RNA, 20 nt, Artificial Sequence
  HTT spacer sequence GTCN PAM
ggcgagguagggcaugggug

SEQ ID NO: 22149 - RNA, 20 nt, Artificial Sequence
  HTT spacer sequence GTCN PAM
uugagagccaccucugcuga

SEQ ID NO: 22150 - RNA, 20 nt, Artificial Sequence
  HTT spacer sequence GTCN PAM
cagccuuucugcugcagccu

SEQ ID NO: 22151 - RNA, 20 nt, Artificial Sequence
  HTT spacer sequence GTCN PAM
agcccccuucccaaggccag

SEQ ID NO: 22152 - RNA, 20 nt, Artificial Sequence
  HTT spacer sequence GTCN PAM
ccuccucuccgcccccaacc

SEQ ID NO: 22153 - RNA, 20 nt, Artificial Sequence
  HTT spacer sequence GTCN PAM
ggaucagggucuccuccucu

SEQ ID NO: 22154 - RNA, 20 nt, Artificial Sequence
  HTT spacer sequence GTCN PAM
ugaccgcggaggaccggggc

SEQ ID NO: 22155 - RNA, 20 nt, Artificial Sequence
  HTT spacer sequence GTCN PAM
agacaggcagggguggaguc

SEQ ID NO: 22156 - RNA, 20 nt, Artificial Sequence
  HTT spacer sequence GTCN PAM
uccgcggucaagacaggcag

SEQ ID NO: 22157 - RNA, 20 nt, Artificial Sequence
  HTT spacer sequence GTCN PAM
gggccccgguccuccgcggu

SEQ ID NO: 22158 - RNA, 20 nt, Artificial Sequence
  HTT spacer sequence GTCN PAM
ggcggugggcccggccugcc

SEQ ID NO: 22159 - RNA, 20 nt, Artificial Sequence
  HTT spacer sequence GTCN PAM
ucacugggccucucugaaca

SEQ ID NO: 22160 - RNA, 20 nt, Artificial Sequence
  HTT spacer sequence GTCN PAM
cccaggcccccucugggcca

SEQ ID NO: 22161 - RNA, 20 nt, Artificial Sequence
  HTT spacer sequence GTCN PAM
ucacccucagcguggcccag

SEQ ID NO: 22162 - RNA, 20 nt, Artificial Sequence
  HTT spacer sequence GTCN PAM
uccuguccccugcccgggcc

SEQ ID NO: 22163 - RNA, 20 nt, Artificial Sequence
  HTT spacer sequence GTCN PAM
ccugcccgggccccgaggcu

SEQ ID NO: 22164 - RNA, 20 nt, Artificial Sequence
  HTT spacer sequence GTCN PAM
ggcccacuccuucuuccuuc

SEQ ID NO: 22165 - RNA, 20 nt, Artificial Sequence
  HTT spacer sequence GTCN PAM
gcaccucuuccuguugccuc

SEQ ID NO: 22166 - RNA, 20 nt, Artificial Sequence
  HTT spacer sequence GTCN PAM
ggccagagaccccggccugg

SEQ ID NO: 22167 - RNA, 20 nt, Artificial Sequence
  HTT spacer sequence GTCN PAM
cuggccggacaggggaaggg

SEQ ID NO: 22168 - RNA, 20 nt, Artificial Sequence
  HTT spacer sequence GTCN PAM
ccuugagcccaccugugcug

SEQ ID NO: 22169 - RNA, 20 nt, Artificial Sequence
  HTT spacer sequence GTCN PAM
uugcgcuggcuuccuccugg

SEQ ID NO: 22170 - RNA, 20 nt, Artificial Sequence
  HTT spacer sequence GTCN PAM
uguccuugcgcuggcuuccu

SEQ ID NO: 22171 - RNA, 20 nt, Artificial Sequence
  HTT spacer sequence GTCN PAM
aggcugggucuuguccuugc

SEQ ID NO: 22172 - RNA, 20 nt, Artificial Sequence
  HTT spacer sequence GTCN PAM
uuuuuuauuccuuaguaaau

SEQ ID NO: 22173 - RNA, 20 nt, Artificial Sequence
  HTT spacer sequence GTCN PAM
ggaguucaagaccagccuga

SEQ ID NO: 22174 - RNA, 20 nt, Artificial Sequence
  HTT spacer sequence GTCN PAM
ugaacuccugaccucaacua

SEQ ID NO: 22175 - RNA, 20 nt, Artificial Sequence
  HTT spacer sequence GTCN PAM
ggcuggucuugaacuccuga

SEQ ID NO: 22176 - RNA, 20 nt, Artificial Sequence
  HTT spacer sequence GTCN PAM
cagccucccgaguagcuggg

SEQ ID NO: 22177 - RNA, 20 nt, Artificial Sequence
  HTT spacer sequence GTCN PAM
cccaggcuggagugcagugg

SEQ ID NO: 22178 - RNA, 20 nt, Artificial Sequence
  HTT spacer sequence GTCN PAM
cucugucacccaggcuggag

SEQ ID NO: 22179 - RNA, 20 nt, Artificial Sequence
  HTT spacer sequence GTCN PAM
ggaguucaagaccagccugg

SEQ ID NO: 22180 - RNA, 20 nt, Artificial Sequence
  HTT spacer sequence GTCN PAM
ugaacuccugaccucaggug

SEQ ID NO: 22181 - RNA, 20 nt, Artificial Sequence
  HTT spacer sequence GTCN PAM
cuacuaaaaauacaaauuag

SEQ ID NO: 22182 - RNA, 20 nt, Artificial Sequence
  HTT spacer sequence GTCN PAM
uaccaccacacccagcuaau

SEQ ID NO: 22183 - RNA, 20 nt, Artificial Sequence
  HTT spacer sequence GTCN PAM
ccuugguucaagcacuucuc

SEQ ID NO: 22184 - RNA, 20 nt, Artificial Sequence
  HTT spacer sequence GTCN PAM
cacuuuggugcccaggcuag

SEQ ID NO: 22185 - RNA, 20 nt, Artificial Sequence
  HTT spacer sequence GTCN PAM
caaaaaaauauaugugugug

SEQ ID NO: 22186 - RNA, 20 nt, Artificial Sequence
  HTT spacer sequence GTCN PAM
uucugcugccuuaaugcauu

SEQ ID NO: 22187 - RNA, 20 nt, Artificial Sequence
  HTT spacer sequence GTCN PAM
acucauuucagcacuugagg

SEQ ID NO: 22188 - RNA, 20 nt, Artificial Sequence
  HTT spacer sequence GTCN PAM
cuucccucuguccacucauu

SEQ ID NO: 22189 - RNA, 20 nt, Artificial Sequence
  HTT spacer sequence GTCN PAM
gcacaacagggucccuuccc

SEQ ID NO: 22190 - RNA, 20 nt, Artificial Sequence
  HTT spacer sequence GTCN PAM
cagccuguggcacccgcuga

SEQ ID NO: 22191 - RNA, 20 nt, Artificial Sequence
  HTT spacer sequence GTCN PAM
gcgggugccacaggcuggga

SEQ ID NO: 22192 - RNA, 20 nt, Artificial Sequence
  HTT spacer sequence GTCN PAM
ccaucugucagcgggugcca

SEQ ID NO: 22193 - RNA, 20 nt, Artificial Sequence
  HTT spacer sequence GTCN PAM
uugggccccucgcuuaccca

SEQ ID NO: 22194 - RNA, 20 nt, Artificial Sequence
  HTT spacer sequence GTCN PAM
uuugcccugacccaggagcu

SEQ ID NO: 22195 - RNA, 20 nt, Artificial Sequence
  HTT spacer sequence GTCN PAM
gggcaaaggacgcuggggcc

SEQ ID NO: 22196 - RNA, 20 nt, Artificial Sequence
  HTT spacer sequence GTCN PAM
agauaaaacgccguaaagug

SEQ ID NO: 22197 - RNA, 20 nt, Artificial Sequence
  HTT spacer sequence GTCN PAM
aagggaggccgccaagaccg

SEQ ID NO: 22198 - RNA, 20 nt, Artificial Sequence
  HTT spacer sequence GTCN PAM
uggcggccucccuuggaccg

SEQ ID NO: 22199 - RNA, 20 nt, Artificial Sequence
  HTT spacer sequence GTCN PAM
cuuucacucaucaccguggu

SEQ ID NO: 22200 - RNA, 20 nt, Artificial Sequence
  HTT spacer sequence GTCN PAM
caaggcccacccuguagggc

SEQ ID NO: 22201 - RNA, 20 nt, Artificial Sequence
  HTT spacer sequence GTCN PAM
ggagccaccacgaugggcac

SEQ ID NO: 22202 - RNA, 20 nt, Artificial Sequence
  HTT spacer sequence GTCN PAM
gagaaacccagccccacugc

SEQ ID NO: 22203 - RNA, 20 nt, Artificial Sequence
  HTT spacer sequence GTCN PAM
acuuccagggccuagggacc

SEQ ID NO: 22204 - RNA, 20 nt, Artificial Sequence
  HTT spacer sequence GTCN PAM
cuaggcccuggaaguggaca

SEQ ID NO: 22205 - RNA, 20 nt, Artificial Sequence
  HTT spacer sequence GTCN PAM
gguuugguccucagaguccu

SEQ ID NO: 22206 - RNA, 20 nt, Artificial Sequence
  HTT spacer sequence GTCN PAM
ucagaguccuguugcuaaua

SEQ ID NO: 22207 - RNA, 20 nt, Artificial Sequence
  HTT spacer sequence GTCN PAM
uguugcuaauaagcguggag

SEQ ID NO: 22208 - RNA, 20 nt, Artificial Sequence
  HTT spacer sequence GTCN PAM
ucccccuccacgcuuauuag

SEQ ID NO: 22209 - RNA, 20 nt, Artificial Sequence
  HTT spacer sequence GTCN PAM
cuucacucccugagccuugc

SEQ ID NO: 22210 - RNA, 20 nt, Artificial Sequence
  HTT spacer sequence GTCN PAM
ccagcuuaagggaccaaggc

SEQ ID NO: 22211 - RNA, 20 nt, Artificial Sequence
  HTT spacer sequence GTCN PAM
cuuaagcuggagacuagggg

SEQ ID NO: 22212 - RNA, 20 nt, Artificial Sequence
  HTT spacer sequence GTCN PAM
cagccuuggucccuuaagcu

SEQ ID NO: 22213 - RNA, 20 nt, Artificial Sequence
  HTT spacer sequence GTCN PAM
gagaugcugucugccucacc

SEQ ID NO: 22214 - RNA, 20 nt, Artificial Sequence
  HTT spacer sequence GTCN PAM
gccucaccugggcauguggc

SEQ ID NO: 22215 - RNA, 20 nt, Artificial Sequence
  HTT spacer sequence GTCN PAM
aggccacaugcccaggugag

SEQ ID NO: 22216 - RNA, 20 nt, Artificial Sequence
  HTT spacer sequence GTCN PAM
uaguuagaacugccagucca

SEQ ID NO: 22217 - RNA, 20 nt, Artificial Sequence
  HTT spacer sequence GTCN PAM
cucaugucagaaggugggug

SEQ ID NO: 22218 - RNA, 20 nt, Artificial Sequence
  HTT spacer sequence GTCN PAM
gaaggugggugccuucucuu

SEQ ID NO: 22219 - RNA, 20 nt, Artificial Sequence
  HTT spacer sequence GTCN PAM
gacucuauguaaucccaugc

SEQ ID NO: 22220 - RNA, 20 nt, Artificial Sequence
  HTT spacer sequence GTCN PAM
gacagagcauagcuugugca

SEQ ID NO: 22221 - RNA, 20 nt, Artificial Sequence
  HTT spacer sequence GTCN PAM
ugggagcaaucuuccacaug

SEQ ID NO: 22222 - RNA, 20 nt, Artificial Sequence
  HTT spacer sequence GTCN PAM
acgugucuggguggaacaga

SEQ ID NO: 22223 - RNA, 20 nt, Artificial Sequence
  HTT spacer sequence GTCN PAM
ggguggaacagaugucacaa

SEQ ID NO: 22224 - RNA, 20 nt, Artificial Sequence
  HTT spacer sequence GTCN PAM
caaggaugugagucagaggu

SEQ ID NO: 22225 - RNA, 20 nt, Artificial Sequence
  HTT spacer sequence GTCN PAM
gagguggcugccucccuaac

SEQ ID NO: 22226 - RNA, 20 nt, Artificial Sequence
  HTT spacer sequence GTCN PAM
gggcucccaaucuguuaggg

SEQ ID NO: 22227 - RNA, 20 nt, Artificial Sequence
  HTT spacer sequence GTCN PAM
cccucugucugggcucccaa

SEQ ID NO: 22228 - RNA, 20 nt, Artificial Sequence
  HTT spacer sequence GTCN PAM
caugguaucgggcacagggg

SEQ ID NO: 22229 - RNA, 20 nt, Artificial Sequence
  HTT spacer sequence GTCN PAM
cuccacucggccugaagucu

SEQ ID NO: 22230 - RNA, 20 nt, Artificial Sequence
  HTT spacer sequence GTCN PAM
cucuugcacagugucacucc

SEQ ID NO: 22231 - RNA, 20 nt, Artificial Sequence
  HTT spacer sequence GTCN PAM
ggcugaccagccucaccaug

SEQ ID NO: 22232 - RNA, 20 nt, Artificial Sequence
  HTT spacer sequence GTCN PAM
gccggacccugucucucuug

SEQ ID NO: 22233 - RNA, 20 nt, Artificial Sequence
  HTT spacer sequence GTCN PAM
uggugaggcuggucagccgg

SEQ ID NO: 22234 - RNA, 20 nt, Artificial Sequence
  HTT spacer sequence GTCN PAM
ccuucugucccggcaccgcc

SEQ ID NO: 22235 - RNA, 20 nt, Artificial Sequence
  HTT spacer sequence GTCN PAM
cggcaccgccugcuccuguu

SEQ ID NO: 22236 - RNA, 20 nt, Artificial Sequence
  HTT spacer sequence GTCN PAM
cugcggaugcguggaccccg

SEQ ID NO: 22237 - RNA, 20 nt, Artificial Sequence
  HTT spacer sequence GTCN PAM
acgcauccgcagagacucgg

SEQ ID NO: 22238 - RNA, 20 nt, Artificial Sequence
  HTT spacer sequence GTCN PAM
uggguccagcagcuccggga

SEQ ID NO: 22239 - RNA, 20 nt, Artificial Sequence
  HTT spacer sequence GTCN PAM
agcagcuccgggacugcccc

SEQ ID NO: 22240 - RNA, 20 nt, Artificial Sequence
  HTT spacer sequence GTCN PAM
cggagcugcuggacccagga

SEQ ID NO: 22241 - RNA, 20 nt, Artificial Sequence
  HTT spacer sequence GTCN PAM
ucaguuuccccaggaguaac

SEQ ID NO: 22242 - RNA, 20 nt, Artificial Sequence
  HTT spacer sequence GTCN PAM
ggugcucacccuagagaaaa

SEQ ID NO: 22243 - RNA, 20 nt, Artificial Sequence
  HTT spacer sequence GTCN PAM
cgcucaaugcugcugguucc

SEQ ID NO: 22244 - RNA, 20 nt, Artificial Sequence
  HTT spacer sequence GTCN PAM
ugcugagcugggcccugcgg

SEQ ID NO: 22245 - RNA, 20 nt, Artificial Sequence
  HTT spacer sequence GTCN PAM
ccuggccuccuacccagagc

SEQ ID NO: 22246 - RNA, 20 nt, Artificial Sequence
  HTT spacer sequence GTCN PAM
uuaagguuggugggcuuccu

SEQ ID NO: 22247 - RNA, 20 nt, Artificial Sequence
  HTT spacer sequence GTCN PAM
cccagagccuggggccaccu

SEQ ID NO: 22248 - RNA, 20 nt, Artificial Sequence
  HTT spacer sequence GTCN PAM
uaaucgggagaacaaaacga

SEQ ID NO: 22249 - RNA, 20 nt, Artificial Sequence
  HTT spacer sequence GTCN PAM
acuguguucugagugcgcca

SEQ ID NO: 22250 - RNA, 20 nt, Artificial Sequence
  HTT spacer sequence GTCN PAM
agcagccuagcccuccuauc

SEQ ID NO: 22251 - RNA, 20 nt, Artificial Sequence
  HTT spacer sequence GTCN PAM
ccucuugugauaggagggcu

SEQ ID NO: 22252 - RNA, 20 nt, Artificial Sequence
  HTT spacer sequence GTCN PAM
cacgcaucccaggagggucu

SEQ ID NO: 22253 - RNA, 20 nt, Artificial Sequence
  HTT spacer sequence GTCN PAM
gguuggcgggagcccucugc

SEQ ID NO: 22254 - RNA, 20 nt, Artificial Sequence
  HTT spacer sequence GTCN PAM
gcagccaggcuggugugggc

SEQ ID NO: 22255 - RNA, 20 nt, Artificial Sequence
  HTT spacer sequence GTCN PAM
cggccacagcugaucugcuc

SEQ ID NO: 22256 - RNA, 20 nt, Artificial Sequence
  HTT spacer sequence GTCN PAM
cugagcagaucagcuguggc

SEQ ID NO: 22257 - RNA, 20 nt, Artificial Sequence
  HTT spacer sequence GTCN PAM
cccuggaggcccaggcugcg

SEQ ID NO: 22258 - RNA, 20 nt, Artificial Sequence
  HTT spacer sequence GTCN PAM
cccgagauggaagaaguggg

SEQ ID NO: 22259 - RNA, 20 nt, Artificial Sequence
  HTT spacer sequence GTCN PAM
acaccccagcuggcuggaac

SEQ ID NO: 22260 - RNA, 20 nt, Artificial Sequence
  HTT spacer sequence GTCN PAM
guucaugcugcaggaggcac

SEQ ID NO: 22261 - RNA, 20 nt, Artificial Sequence
  HTT spacer sequence GTCN PAM
cacugggcacuguucaggca

SEQ ID NO: 22262 - RNA, 20 nt, Artificial Sequence
  HTT spacer sequence GTCN PAM
uuggugccugaacagugccc

SEQ ID NO: 22263 - RNA, 20 nt, Artificial Sequence
  HTT spacer sequence GTCN PAM
cccauguccuuggugccuga

SEQ ID NO: 22264 - RNA, 20 nt, Artificial Sequence
  HTT spacer sequence GTCN PAM
gucccccauguccuuggugc

SEQ ID NO: 22265 - RNA, 20 nt, Artificial Sequence
  HTT spacer sequence GTCN PAM
ggggaggggcagauagccaa

SEQ ID NO: 22266 - RNA, 20 nt, Artificial Sequence
  HTT spacer sequence GTCN PAM
guuggcuaucugccccuccc

SEQ ID NO: 22267 - RNA, 20 nt, Artificial Sequence
  HTT spacer sequence GTCN PAM
gggggugccgggugggggcu

SEQ ID NO: 22268 - RNA, 20 nt, Artificial Sequence
  HTT spacer sequence GTCN PAM
acggcagggcccccacuccu

SEQ ID NO: 22269 - RNA, 20 nt, Artificial Sequence
  HTT spacer sequence GTCN PAM
agcccaggggaguguggucu

SEQ ID NO: 22270 - RNA, 20 nt, Artificial Sequence
  HTT spacer sequence GTCN PAM
agaugaggggccaaggggca

SEQ ID NO: 22271 - RNA, 20 nt, Artificial Sequence
  HTT spacer sequence GTCN PAM
gugccaagggccgcggggag

SEQ ID NO: 22272 - RNA, 20 nt, Artificial Sequence
  HTT spacer sequence GTCN PAM
ccccgcggcccuuggcacag

SEQ ID NO: 22273 - RNA, 20 nt, Artificial Sequence
  HTT spacer sequence GTCN PAM
ggccgugcuuuuccuuccug

SEQ ID NO: 22274 - RNA, 20 nt, Artificial Sequence
  HTT spacer sequence GTCN PAM
agggaagggaggaaccgccc

SEQ ID NO: 22275 - RNA, 20 nt, Artificial Sequence
  HTT spacer sequence GTCN PAM
gcgugcaggcuuugguggga

SEQ ID NO: 22276 - RNA, 20 nt, Artificial Sequence
  HTT spacer sequence GTCN PAM
caugcauagagcggcccucu

SEQ ID NO: 22277 - RNA, 20 nt, Artificial Sequence
  HTT spacer sequence GTCN PAM
ugccccacccaguggcuccc

SEQ ID NO: 22278 - RNA, 20 nt, Artificial Sequence
  HTT spacer sequence GTCN PAM
cgagaggggcggcaguccug

SEQ ID NO: 22279 - RNA, 20 nt, Artificial Sequence
  HTT spacer sequence GTCN PAM
cucaccgcagccagccuggg

SEQ ID NO: 22280 - RNA, 20 nt, Artificial Sequence
  HTT spacer sequence GTCN PAM
accaccccaaguuccuggcu

SEQ ID NO: 22281 - RNA, 20 nt, Artificial Sequence
  HTT spacer sequence GTCN PAM
ugauguguggggugggccgg

SEQ ID NO: 22282 - RNA, 20 nt, Artificial Sequence
  HTT spacer sequence GTCN PAM
guguuugugaagaacugaag

SEQ ID NO: 22283 - RNA, 20 nt, Artificial Sequence
  HTT spacer sequence GTCN PAM
caaaccacaagcagcagagg

SEQ ID NO: 22284 - RNA, 20 nt, Artificial Sequence
  HTT spacer sequence GTCN PAM
gggggaagccacggcuggca

SEQ ID NO: 22285 - RNA, 20 nt, Artificial Sequence
  HTT spacer sequence GTCN PAM
ccagccccaccucaccgucu

SEQ ID NO: 22286 - RNA, 20 nt, Artificial Sequence
  HTT spacer sequence GTCN PAM
ccagccccaccucacccuca

SEQ ID NO: 22287 - RNA, 20 nt, Artificial Sequence
  HTT spacer sequence GTCN PAM
cgacucccaugcccaucuca

SEQ ID NO: 22288 - RNA, 20 nt, Artificial Sequence
  HTT spacer sequence GTCN PAM
ggacugcccgggggccucca

SEQ ID NO: 22289 - RNA, 20 nt, Artificial Sequence
  HTT spacer sequence GTCN PAM
ccaggaaagguucuugagau

SEQ ID NO: 22290 - RNA, 20 nt, Artificial Sequence
  HTT spacer sequence GTCN PAM
cuguccccaggaaagguucu

SEQ ID NO: 22291 - RNA, 20 nt, Artificial Sequence
  HTT spacer sequence GTCN PAM
ucagagggaagcugcaaugu

SEQ ID NO: 22292 - RNA, 20 nt, Artificial Sequence
  HTT spacer sequence GTCN PAM
gcauuuuucuuaauucccuu

SEQ ID NO: 22293 - RNA, 20 nt, Artificial Sequence
  HTT spacer sequence GTCN PAM
guugcacacagcaguggccu

SEQ ID NO: 22294 - RNA, 20 nt, Artificial Sequence
  HTT spacer sequence GTCN PAM
ggccacugcugugugcaacg

SEQ ID NO: 22295 - RNA, 20 nt, Artificial Sequence
  HTT spacer sequence GTCN PAM
cugccuccacccugcaccgc

SEQ ID NO: 22296 - RNA, 20 nt, Artificial Sequence
  HTT spacer sequence GTCN PAM
ucugggaacacugcugucuc

SEQ ID NO: 22297 - RNA, 20 nt, Artificial Sequence
  HTT spacer sequence GTCN PAM
ccagugcaccagccuuucuc

SEQ ID NO: 22298 - RNA, 20 nt, Artificial Sequence
  HTT spacer sequence GTCN PAM
cacugggcagagguccaggg

SEQ ID NO: 22299 - RNA, 20 nt, Artificial Sequence
  HTT spacer sequence GTCN PAM
agggguguggaagggccuca

SEQ ID NO: 22300 - RNA, 20 nt, Artificial Sequence
  HTT spacer sequence GTCN PAM
aauuagcgcuaagucacaau

SEQ ID NO: 22301 - RNA, 20 nt, Artificial Sequence
  HTT spacer sequence GTCN PAM
caauuuuuucacucugagcu

SEQ ID NO: 22302 - RNA, 20 nt, Artificial Sequence
  HTT spacer sequence GTCN PAM
ggccucauguauggacauga

SEQ ID NO: 22303 - RNA, 20 nt, Artificial Sequence
  HTT spacer sequence GTCN PAM
auacaugaggccagacccca

SEQ ID NO: 22304 - RNA, 20 nt, Artificial Sequence
  HTT spacer sequence GTCN PAM
uguccauacaugaggccaga

SEQ ID NO: 22305 - RNA, 20 nt, Artificial Sequence
  HTT spacer sequence GTCN PAM
gucuguccuucucuuggguc

SEQ ID NO: 22306 - RNA, 20 nt, Artificial Sequence
  HTT spacer sequence GTCN PAM
guccuucucuuggguccugc

SEQ ID NO: 22307 - RNA, 20 nt, Artificial Sequence
  HTT spacer sequence GTCN PAM
uucucuuggguccugccaug

SEQ ID NO: 22308 - RNA, 20 nt, Artificial Sequence
  HTT spacer sequence GTCN PAM
ugccaugggccuggugccca

SEQ ID NO: 22309 - RNA, 20 nt, Artificial Sequence
  HTT spacer sequence GTCN PAM
cacugaaucuccaaggccca

SEQ ID NO: 22310 - RNA, 20 nt, Artificial Sequence
  HTT spacer sequence GTCN PAM
aagucccacugaaucuccaa

SEQ ID NO: 22311 - RNA, 20 nt, Artificial Sequence
  HTT spacer sequence GTCN PAM
cuggcacuccccacgggucc

SEQ ID NO: 22312 - RNA, 20 nt, Artificial Sequence
  HTT spacer sequence GTCN PAM
auggcacaguucugccacca

SEQ ID NO: 22313 - RNA, 20 nt, Artificial Sequence
  HTT spacer sequence GTCN PAM
ccuccacauggaaaccaaac

SEQ ID NO: 22314 - RNA, 20 nt, Artificial Sequence
  HTT spacer sequence GTCN PAM
ugcacuugccccauccuggu

SEQ ID NO: 22315 - RNA, 20 nt, Artificial Sequence
  HTT spacer sequence GTCN PAM
agugucgggggcccagggca

SEQ ID NO: 22316 - RNA, 20 nt, Artificial Sequence
  HTT spacer sequence GTCN PAM
ggggcccagggcaggaaggg

SEQ ID NO: 22317 - RNA, 20 nt, Artificial Sequence
  HTT spacer sequence GTCN PAM
acguggauggggugcggcgc

SEQ ID NO: 22318 - RNA, 20 nt, Artificial Sequence
  HTT spacer sequence GTCN PAM
caggccacauucaccacggc

SEQ ID NO: 22319 - RNA, 20 nt, Artificial Sequence
  HTT spacer sequence GTCN PAM
gcaagccuggcggguguggg

SEQ ID NO: 22320 - RNA, 20 nt, Artificial Sequence
  HTT spacer sequence GTCN PAM
ggcauggcaggugaggcugg

SEQ ID NO: 22321 - RNA, 20 nt, Artificial Sequence
  HTT spacer sequence GTCN PAM
accagccucaccugccaugc

SEQ ID NO: 22322 - RNA, 20 nt, Artificial Sequence
  HTT spacer sequence GTCN PAM
cagccuuguggagccugucu

SEQ ID NO: 22323 - RNA, 20 nt, Artificial Sequence
  HTT spacer sequence GTCN PAM
cucccugacaggcacgccca

SEQ ID NO: 22324 - RNA, 20 nt, Artificial Sequence
  HTT spacer sequence GTCN PAM
cgugcugaaaagagaccucc

SEQ ID NO: 22325 - RNA, 20 nt, Artificial Sequence
  HTT spacer sequence GTCN PAM
cuuuucagcacgagacaaac

SEQ ID NO: 22326 - RNA, 20 nt, Artificial Sequence
  HTT spacer sequence GTCN PAM
ugauaaaaugucaccugcag

SEQ ID NO: 22327 - RNA, 20 nt, Artificial Sequence
  HTT spacer sequence GTCN PAM
ccugcagccacgcgugcggc

SEQ ID NO: 22328 - RNA, 20 nt, Artificial Sequence
  HTT spacer sequence GTCN PAM
ugccgcacgcguggcugcag

SEQ ID NO: 22329 - RNA, 20 nt, Artificial Sequence
  HTT spacer sequence GTCN PAM
cucuccacgggaacucaggg

SEQ ID NO: 22330 - RNA, 20 nt, Artificial Sequence
  HTT spacer sequence GTCN PAM
agggaacugcuggccugucc

SEQ ID NO: 22331 - RNA, 20 nt, Artificial Sequence
  HTT spacer sequence GTCN PAM
uuguccccauggucccaguc

SEQ ID NO: 22332 - RNA, 20 nt, Artificial Sequence
  HTT spacer sequence GTCN PAM
ccauggucccagucucacug

SEQ ID NO: 22333 - RNA, 20 nt, Artificial Sequence
  HTT spacer sequence GTCN PAM
cagucucacugucacugugu

SEQ ID NO: 22334 - RNA, 20 nt, Artificial Sequence
  HTT spacer sequence GTCN PAM
cacugucacugugugcucau

SEQ ID NO: 22335 - RNA, 20 nt, Artificial Sequence
  HTT spacer sequence GTCN PAM
cugugugcucauguuugaug

SEQ ID NO: 22336 - RNA, 20 nt, Artificial Sequence
  HTT spacer sequence GTCN PAM
ccagcacagagcccucccca

SEQ ID NO: 22337 - RNA, 20 nt, Artificial Sequence
  HTT spacer sequence GTCN PAM
gcccuggccaggugguaucu

SEQ ID NO: 22338 - RNA, 20 nt, Artificial Sequence
  HTT spacer sequence GTCN PAM
ccaggcugccacugugcaga

SEQ ID NO: 22339 - RNA, 20 nt, Artificial Sequence
  HTT spacer sequence GTCN PAM
caaagagccuuggacccuuc

SEQ ID NO: 22340 - RNA, 20 nt, Artificial Sequence
  HTT spacer sequence GTCN PAM
aaggcucuuugagacccuca

SEQ ID NO: 22341 - RNA, 20 nt, Artificial Sequence
  HTT spacer sequence GTCN PAM
guggagccauucauucagcu

SEQ ID NO: 22342 - RNA, 20 nt, Artificial Sequence
  HTT spacer sequence GTCN PAM
gggcuucuguuuguuuuuua

SEQ ID NO: 22343 - RNA, 20 nt, Artificial Sequence
  HTT spacer sequence GTCN PAM
cugaaggaguaaguaagucu

SEQ ID NO: 22344 - RNA, 20 nt, Artificial Sequence
  HTT spacer sequence GTCN PAM
ggaggagcugccugagcuuc

SEQ ID NO: 22345 - RNA, 20 nt, Artificial Sequence
  HTT spacer sequence GTCN PAM
cccuggacuggcggggggug

SEQ ID NO: 22346 - RNA, 20 nt, Artificial Sequence
  HTT spacer sequence GTCN PAM
agggagacccuguggguggg

SEQ ID NO: 22347 - RNA, 20 nt, Artificial Sequence
  HTT spacer sequence GTCN PAM
ggcagugggcaggggccuga

SEQ ID NO: 22348 - RNA, 20 nt, Artificial Sequence
  HTT spacer sequence GTCN PAM
ggccccugcccacugccuga

SEQ ID NO: 22349 - RNA, 20 nt, Artificial Sequence
  HTT spacer sequence GTCN PAM
gugccggguaacucagcuuc

SEQ ID NO: 22350 - RNA, 20 nt, Artificial Sequence
  HTT spacer sequence GTCN PAM
gggcucuuuuugcuccccuu

SEQ ID NO: 22351 - RNA, 20 nt, Artificial Sequence
  HTT spacer sequence GTCN PAM
cuccgcaguguacuggcugg

SEQ ID NO: 22352 - RNA, 20 nt, Artificial Sequence
  HTT spacer sequence GTCN PAM
cccaguccccgagggggcug

SEQ ID NO: 22353 - RNA, 20 nt, Artificial Sequence
  HTT spacer sequence GTCN PAM
ccgagggggcuggcacuugg

SEQ ID NO: 22354 - RNA, 20 nt, Artificial Sequence
  HTT spacer sequence GTCN PAM
uggguacacugcgcagccua

SEQ ID NO: 22355 - RNA, 20 nt, Artificial Sequence
  HTT spacer sequence GTCN PAM
ggcaccacugcccuucuccc

SEQ ID NO: 22356 - RNA, 20 nt, Artificial Sequence
  HTT spacer sequence GTCN PAM
cuggcuauggugagcccccu

SEQ ID NO: 22357 - RNA, 20 nt, Artificial Sequence
  HTT spacer sequence GTCN PAM
uccguggucgcuggcuaugg

SEQ ID NO: 22358 - RNA, 20 nt, Artificial Sequence
  HTT spacer sequence GTCN PAM
cccaccagccgccgccguug

SEQ ID NO: 22359 - RNA, 20 nt, Artificial Sequence
  HTT spacer sequence GTCN PAM
gcccaggggagggugcauca

SEQ ID NO: 22360 - RNA, 20 nt, Artificial Sequence
  HTT spacer sequence GTCN PAM
ccagccgaugaggaggaagg

SEQ ID NO: 22361 - RNA, 20 nt, Artificial Sequence
  HTT spacer sequence GTCN PAM
ugcagggcacgggcugugcu

SEQ ID NO: 22362 - RNA, 20 nt, Artificial Sequence
  HTT spacer sequence GTCN PAM
ccugaguccugcagggcacg

SEQ ID NO: 22363 - RNA, 20 nt, Artificial Sequence
  HTT spacer sequence GTCN PAM
cccugaaauaacgccccugc

SEQ ID NO: 22364 - RNA, 20 nt, Artificial Sequence
  HTT spacer sequence GTCN PAM
ccagauggggacccaccuac

SEQ ID NO: 22365 - RNA, 20 nt, Artificial Sequence
  HTT spacer sequence GTCN PAM
ccaucuggcgacggccugcu

SEQ ID NO: 22366 - RNA, 20 nt, Artificial Sequence
  HTT spacer sequence GTCN PAM
acuuccucuaccucuuccug

SEQ ID NO: 22367 - RNA, 20 nt, Artificial Sequence
  HTT spacer sequence GTCN PAM
ccuucucagcacgcgccacc

SEQ ID NO: 22368 - RNA, 20 nt, Artificial Sequence
  HTT spacer sequence GTCN PAM
aguccuuacugucuccagag

SEQ ID NO: 22369 - RNA, 20 nt, Artificial Sequence
  HTT spacer sequence GTCN PAM
uuacugucuccagagggugg

SEQ ID NO: 22370 - RNA, 20 nt, Artificial Sequence
  HTT spacer sequence GTCN PAM
ccagaggguggguccuggcc

SEQ ID NO: 22371 - RNA, 20 nt, Artificial Sequence
  HTT spacer sequence GTCN PAM
uggccacgagcgacagccga

SEQ ID NO: 22372 - RNA, 20 nt, Artificial Sequence
  HTT spacer sequence GTCN PAM
cucguggccaggacccaccc

SEQ ID NO: 22373 - RNA, 20 nt, Artificial Sequence
  HTT spacer sequence GTCN PAM
guggguugccaggccagcag

SEQ ID NO: 22374 - RNA, 20 nt, Artificial Sequence
  HTT spacer sequence GTCN PAM
caacaccaagagagcggccc

SEQ ID NO: 22375 - RNA, 20 nt, Artificial Sequence
  HTT spacer sequence GTCN PAM
cagaccacagcccuacccgu

SEQ ID NO: 22376 - RNA, 20 nt, Artificial Sequence
  HTT spacer sequence GTCN PAM
gggacccacaggccuagggg

SEQ ID NO: 22377 - RNA, 20 nt, Artificial Sequence
  HTT spacer sequence GTCN PAM
cuggcaggaagcagaagaug

SEQ ID NO: 22378 - RNA, 20 nt, Artificial Sequence
  HTT spacer sequence GTCN PAM
gaggcugcgaagagcagggc

SEQ ID NO: 22379 - RNA, 20 nt, Artificial Sequence
  HTT spacer sequence GTCN PAM
uugggguggccuucucacug

SEQ ID NO: 22380 - RNA, 20 nt, Artificial Sequence
  HTT spacer sequence GTCN PAM
uuucccuaggcggucauugg

SEQ ID NO: 22381 - RNA, 20 nt, Artificial Sequence
  HTT spacer sequence GTCN PAM
cccugugcagcucggguggu

SEQ ID NO: 22382 - RNA, 20 nt, Artificial Sequence
  HTT spacer sequence GTCN PAM
ccaccaggaccccaaaggcc

SEQ ID NO: 22383 - RNA, 20 nt, Artificial Sequence
  HTT spacer sequence GTCN PAM
ugguggugacuucugggccu

SEQ ID NO: 22384 - RNA, 20 nt, Artificial Sequence
  HTT spacer sequence GTCN PAM
aggcaugguaagugcacagg

SEQ ID NO: 22385 - RNA, 20 nt, Artificial Sequence
  HTT spacer sequence GTCN PAM
gcaacgauggccguggagag

SEQ ID NO: 22386 - RNA, 20 nt, Artificial Sequence
  HTT spacer sequence GTCN PAM
gccucuccacggccaucguu

SEQ ID NO: 22387 - RNA, 20 nt, Artificial Sequence
  HTT spacer sequence GTCN PAM
gggccaccucucggagcuuu

SEQ ID NO: 22388 - RNA, 20 nt, Artificial Sequence
  HTT spacer sequence GTCN PAM
cuuaaggccaggaguggcuc

SEQ ID NO: 22389 - RNA, 20 nt, Artificial Sequence
  HTT spacer sequence GTCN PAM
ggguugccaagcccuacucu

SEQ ID NO: 22390 - RNA, 20 nt, Artificial Sequence
  HTT spacer sequence GTCN PAM
cccgagaacccccuccagga

SEQ ID NO: 22391 - RNA, 20 nt, Artificial Sequence
  HTT spacer sequence GTCN PAM
gagguggccccagugagugg

SEQ ID NO: 22392 - RNA, 20 nt, Artificial Sequence
  HTT spacer sequence GTCN PAM
ugcaguuucugugugcgcca

SEQ ID NO: 22393 - RNA, 20 nt, Artificial Sequence
  HTT spacer sequence GTCN PAM
cauuggcucggcauucucug

SEQ ID NO: 22394 - RNA, 20 nt, Artificial Sequence
  HTT spacer sequence GTCN PAM
cucaggucucauuggcucgg

SEQ ID NO: 22395 - RNA, 20 nt, Artificial Sequence
  HTT spacer sequence GTCN PAM
ccaucauggggcugccuggc

SEQ ID NO: 22396 - RNA, 20 nt, Artificial Sequence
  HTT spacer sequence GTCN PAM
uggggcccucaaggccaaug

SEQ ID NO: 22397 - RNA, 20 nt, Artificial Sequence
  HTT spacer sequence GTCN PAM
agccccguccugagggucca

SEQ ID NO: 22398 - RNA, 20 nt, Artificial Sequence
  HTT spacer sequence GTCN PAM
ugaggguccagucaugcugg

SEQ ID NO: 22399 - RNA, 20 nt, Artificial Sequence
  HTT spacer sequence GTCN PAM
agucaugcugggcccuacac

SEQ ID NO: 22400 - RNA, 20 nt, Artificial Sequence
  HTT spacer sequence GTCN PAM
ugcugggcccuacacucaca

SEQ ID NO: 22401 - RNA, 20 nt, Artificial Sequence
  HTT spacer sequence GTCN PAM
cguucagauccuuccucauc

SEQ ID NO: 22402 - RNA, 20 nt, Artificial Sequence
  HTT spacer sequence GTCN PAM
uggcuucugggcaugauccc

SEQ ID NO: 22403 - RNA, 20 nt, Artificial Sequence
  HTT spacer sequence GTCN PAM
ggugcccuugcccacauguc

SEQ ID NO: 22404 - RNA, 20 nt, Artificial Sequence
  HTT spacer sequence GTCN PAM
uugccuucccacucccuggg

SEQ ID NO: 22405 - RNA, 20 nt, Artificial Sequence
  HTT spacer sequence GTCN PAM
agcccaggccccuccccaau

SEQ ID NO: 22406 - RNA, 20 nt, Artificial Sequence
  HTT spacer sequence GTCN PAM
accaaacauaggaccguaga

SEQ ID NO: 22407 - RNA, 20 nt, Artificial Sequence
  HTT spacer sequence GTCN PAM
uauguuugguggacgugguc

SEQ ID NO: 22408 - RNA, 20 nt, Artificial Sequence
  HTT spacer sequence GTCN PAM
uguucggagguauggcuggc

SEQ ID NO: 22409 - RNA, 20 nt, Artificial Sequence
  HTT spacer sequence GTCN PAM
accccgcccugccaggagcc

SEQ ID NO: 22410 - RNA, 20 nt, Artificial Sequence
  HTT spacer sequence GTCN PAM
uaggggaugaggaaucacga

SEQ ID NO: 22411 - RNA, 20 nt, Artificial Sequence
  HTT spacer sequence GTCN PAM
gaugggccuggggggcaggg

SEQ ID NO: 22412 - RNA, 20 nt, Artificial Sequence
  HTT spacer sequence GTCN PAM
uugcccugcggcccacagug

SEQ ID NO: 22413 - RNA, 20 nt, Artificial Sequence
  HTT spacer sequence GTCN PAM
agcaggaggccgagaaagac

SEQ ID NO: 22414 - RNA, 20 nt, Artificial Sequence
  HTT spacer sequence GTCN PAM
uucucggccuccugcuggac

SEQ ID NO: 22415 - RNA, 20 nt, Artificial Sequence
  HTT spacer sequence GTCN PAM
ccguugucuuucucggccuc

SEQ ID NO: 22416 - RNA, 20 nt, Artificial Sequence
  HTT spacer sequence GTCN PAM
gagcagcccaccaugggaug

SEQ ID NO: 22417 - RNA, 20 nt, Artificial Sequence
  HTT spacer sequence GTCN PAM
gguuagcggggaagccgagu

SEQ ID NO: 22418 - RNA, 20 nt, Artificial Sequence
  HTT spacer sequence GTCN PAM
uccggggccuggcauacccc

SEQ ID NO: 22419 - RNA, 20 nt, Artificial Sequence
  HTT spacer sequence GTCN PAM
gguguggggguaugccaggc

SEQ ID NO: 22420 - RNA, 20 nt, Artificial Sequence
  HTT spacer sequence GTCN PAM
guaggccagagccccugcca

SEQ ID NO: 22421 - RNA, 20 nt, Artificial Sequence
  HTT spacer sequence GTCN PAM
ugagagaccagggugagcac

SEQ ID NO: 22422 - RNA, 20 nt, Artificial Sequence
  HTT spacer sequence GTCN PAM
cucaggaccguugccuuugc

SEQ ID NO: 22423 - RNA, 20 nt, Artificial Sequence
  HTT spacer sequence GTCN PAM
gcgaugugcucacccugguc

SEQ ID NO: 22424 - RNA, 20 nt, Artificial Sequence
  HTT spacer sequence GTCN PAM
gggccaggggccggaaucgc

SEQ ID NO: 22425 - RNA, 20 nt, Artificial Sequence
  HTT spacer sequence GTCN PAM
cccuggcgggggccaugggg

SEQ ID NO: 22426 - RNA, 20 nt, Artificial Sequence
  HTT spacer sequence GTCN PAM
ggugugcaccccauggcccc

SEQ ID NO: 22427 - RNA, 20 nt, Artificial Sequence
  HTT spacer sequence GTCN PAM
cggucccgcccccaccccgc

SEQ ID NO: 22428 - RNA, 20 nt, Artificial Sequence
  HTT spacer sequence GTCN PAM
cgcccccaccccgcgcgccc

SEQ ID NO: 22429 - RNA, 20 nt, Artificial Sequence
  HTT spacer sequence GTCN PAM
cgccccccacccugcgcguc

SEQ ID NO: 22430 - RNA, 20 nt, Artificial Sequence
  HTT spacer sequence GTCN PAM
ccggucccgucccccacccu

SEQ ID NO: 22431 - RNA, 20 nt, Artificial Sequence
  HTT spacer sequence GTCN PAM
cgucccccacccugcgcgcc

SEQ ID NO: 22432 - RNA, 20 nt, Artificial Sequence
  HTT spacer sequence GTCN PAM
cccacccugcgcgcccucua

SEQ ID NO: 22433 - RNA, 20 nt, Artificial Sequence
  HTT spacer sequence GTCN PAM
agccccacaccccgcgcgcc

SEQ ID NO: 22434 - RNA, 20 nt, Artificial Sequence
  HTT spacer sequence GTCN PAM
cgucuccucccccaccccgc

SEQ ID NO: 22435 - RNA, 20 nt, Artificial Sequence
  HTT spacer sequence GTCN PAM
ccucccccaccccgcgcguc

SEQ ID NO: 22436 - RNA, 20 nt, Artificial Sequence
  HTT spacer sequence GTCN PAM
ccugucccacccccaacccg

SEQ ID NO: 22437 - RNA, 20 nt, Artificial Sequence
  HTT spacer sequence GTCN PAM
cacccccaacccgagcgccc

SEQ ID NO: 22438 - RNA, 20 nt, Artificial Sequence
  HTT spacer sequence GTCN PAM
cgccccgcaccugccgcggc

SEQ ID NO: 22439 - RNA, 20 nt, Artificial Sequence
  HTT spacer sequence GTCN PAM
cgagcgcgcagccgcggcag

SEQ ID NO: 22440 - RNA, 20 nt, Artificial Sequence
  HTT spacer sequence GTCN PAM
gucccgagcgcgcagccgcg

SEQ ID NO: 22441 - RNA, 20 nt, Artificial Sequence
  HTT spacer sequence GTCN PAM
cacagacgcggaacagggca

SEQ ID NO: 22442 - RNA, 20 nt, Artificial Sequence
  HTT spacer sequence GTCN PAM
gugcgaccguccgucccgag

SEQ ID NO: 22443 - RNA, 20 nt, Artificial Sequence
  HTT spacer sequence GTCN PAM
cgccccuggcggcgugccug

SEQ ID NO: 22444 - RNA, 20 nt, Artificial Sequence
  HTT spacer sequence GTCN PAM
cuuccggggcguggcguggc

SEQ ID NO: 22445 - RNA, 20 nt, Artificial Sequence
  HTT spacer sequence GTCN PAM
guggcgggguucucgccggu

SEQ ID NO: 22446 - RNA, 20 nt, Artificial Sequence
  HTT spacer sequence GTCN PAM
ugcgggucgcugcuuggcug

SEQ ID NO: 22447 - RNA, 20 nt, Artificial Sequence
  HTT spacer sequence GTCN PAM
cugcuuggcuguggguuagc

SEQ ID NO: 22448 - RNA, 20 nt, Artificial Sequence
  HTT spacer sequence GTCN PAM
cggccucgggguuacgcggc

SEQ ID NO: 22449 - RNA, 20 nt, Artificial Sequence
  HTT spacer sequence GTCN PAM
ugggcccaaggaggccaggc

SEQ ID NO: 22450 - RNA, 20 nt, Artificial Sequence
  HTT spacer sequence GTCN PAM
gcuccgcggggcaggcgucg

SEQ ID NO: 22451 - RNA, 20 nt, Artificial Sequence
  HTT spacer sequence GTCN PAM
cccaucgucugcgcccugcg

SEQ ID NO: 22452 - RNA, 20 nt, Artificial Sequence
  HTT spacer sequence GTCN PAM
gcgcccugcgggccuggccc

SEQ ID NO: 22453 - RNA, 20 nt, Artificial Sequence
  HTT spacer sequence GTCN PAM
uuccacggggagggccaggc

SEQ ID NO: 22454 - RNA, 20 nt, Artificial Sequence
  HTT spacer sequence GTCN PAM
gccccccagcguggggcccc

SEQ ID NO: 22455 - RNA, 20 nt, Artificial Sequence
  HTT spacer sequence GTCN PAM
gcucacgcagcccgagcaga

SEQ ID NO: 22456 - RNA, 20 nt, Artificial Sequence
  HTT spacer sequence GTCN PAM
caggacaggcggcugagggg

SEQ ID NO: 22457 - RNA, 20 nt, Artificial Sequence
  HTT spacer sequence GTCN PAM
ugggacuucaggcucagcac

SEQ ID NO: 22458 - RNA, 20 nt, Artificial Sequence
  HTT spacer sequence GTCN PAM
cugcccacccaauucacacc

SEQ ID NO: 22459 - RNA, 20 nt, Artificial Sequence
  HTT spacer sequence GTCN PAM
uguggcuuucaguugucucu

SEQ ID NO: 22460 - RNA, 20 nt, Artificial Sequence
  HTT spacer sequence GTCN PAM
cccgaaggaggagcuggcgc

SEQ ID NO: 22461 - RNA, 20 nt, Artificial Sequence
  HTT spacer sequence GTCN PAM
ggugcuucugcgcccggaaa

SEQ ID NO: 22462 - RNA, 20 nt, Artificial Sequence
  HTT spacer sequence GTCN PAM
cucugggcaggagaagcuuu

SEQ ID NO: 22463 - RNA, 20 nt, Artificial Sequence
  HTT spacer sequence GTCN PAM
gccacgugagauccgcaagc

SEQ ID NO: 22464 - RNA, 20 nt, Artificial Sequence
  HTT spacer sequence GTCN PAM
uuuuggcugcagguggaaaa

SEQ ID NO: 22465 - RNA, 20 nt, Artificial Sequence
  HTT spacer sequence GTCN PAM
ucugggaaaaaagcuaauaa

SEQ ID NO: 22466 - RNA, 20 nt, Artificial Sequence
  HTT spacer sequence GTCN PAM
gcaaauuuugcaauggcagu

SEQ ID NO: 22467 - RNA, 20 nt, Artificial Sequence
  HTT spacer sequence GTCN PAM
cacaaaagcaggcuaauccc

SEQ ID NO: 22468 - RNA, 20 nt, Artificial Sequence
  HTT spacer sequence GTCN PAM
cgcagcgggaggcuacagga

SEQ ID NO: 22469 - RNA, 20 nt, Artificial Sequence
  HTT spacer sequence GTCN PAM
gaauccuguagccucccgcu

SEQ ID NO: 22470 - RNA, 20 nt, Artificial Sequence
  HTT spacer sequence GTCN PAM
ccuggcaccacccaggcuca

SEQ ID NO: 22471 - RNA, 20 nt, Artificial Sequence
  HTT spacer sequence GTCN PAM
guuccugggugccacaacau

SEQ ID NO: 22472 - RNA, 20 nt, Artificial Sequence
  HTT spacer sequence GTCN PAM
aagcuguuuucgcacugagu

SEQ ID NO: 22473 - RNA, 20 nt, Artificial Sequence
  HTT spacer sequence GTCN PAM
gagaugaaaucacagggagu

SEQ ID NO: 22474 - RNA, 20 nt, Artificial Sequence
  HTT spacer sequence GTCN PAM
ggucagagaugaaaucacag

SEQ ID NO: 22475 - RNA, 20 nt, Artificial Sequence
  HTT spacer sequence GTCN PAM
gaaguacccauuggucaggu

SEQ ID NO: 22476 - RNA, 20 nt, Artificial Sequence
  HTT spacer sequence GTCN PAM
cccugagcaucugggguuug

SEQ ID NO: 22477 - RNA, 20 nt, Artificial Sequence
  HTT spacer sequence GTCN PAM
cccacacagcuagcucugcg

SEQ ID NO: 22478 - RNA, 20 nt, Artificial Sequence
  HTT spacer sequence GTCN PAM
agguaacagggaaggugaac

SEQ ID NO: 22479 - RNA, 20 nt, Artificial Sequence
  HTT spacer sequence GTCN PAM
uugaagagggcgcgugaucc

SEQ ID NO: 22480 - RNA, 20 nt, Artificial Sequence
  HTT spacer sequence GTCN PAM
ugucauugaagagggcgcgu

SEQ ID NO: 22481 - RNA, 20 nt, Artificial Sequence
  HTT spacer sequence GTCN PAM
uggaucgcauagcaaggccu

SEQ ID NO: 22482 - RNA, 20 nt, Artificial Sequence
  HTT spacer sequence GTCN PAM
auugaggccuugcuaugcga

SEQ ID NO: 22483 - RNA, 20 nt, Artificial Sequence
  HTT spacer sequence GTCN PAM
ggucccacuuuuuuuucugu

SEQ ID NO: 22484 - RNA, 20 nt, Artificial Sequence
  HTT spacer sequence GTCN PAM
cacuuuuuuuucuguccugu

SEQ ID NO: 22485 - RNA, 20 nt, Artificial Sequence
  HTT spacer sequence GTCN PAM
uguucucguuuccucuuugc

SEQ ID NO: 22486 - RNA, 20 nt, Artificial Sequence
  HTT spacer sequence GTCN PAM
ugagugcaaaggcuuggcuu

SEQ ID NO: 22487 - RNA, 20 nt, Artificial Sequence
  HTT spacer sequence GTCN PAM
cuguguaggcccaggauuuc

SEQ ID NO: 22488 - RNA, 20 nt, Artificial Sequence
  HTT spacer sequence GTCN PAM
auauacacuuugucacugug

SEQ ID NO: 22489 - RNA, 20 nt, Artificial Sequence
  HTT spacer sequence GTCN PAM
cauccaccaacuaggcuggc

SEQ ID NO: 22490 - RNA, 20 nt, Artificial Sequence
  HTT spacer sequence GTCN PAM
gggguugucacauccaccaa

SEQ ID NO: 22491 - RNA, 20 nt, Artificial Sequence
  HTT spacer sequence GTCN PAM
ggcaggugcacggauccaca

SEQ ID NO: 22492 - RNA, 20 nt, Artificial Sequence
  HTT spacer sequence GTCN PAM
cugagccaucuggggaggcu

SEQ ID NO: 22493 - RNA, 20 nt, Artificial Sequence
  HTT spacer sequence GTCN PAM
gggccugagccucaucucca

SEQ ID NO: 22494 - RNA, 20 nt, Artificial Sequence
  HTT spacer sequence GTCN PAM
cugucuugcgcuuuccagag

SEQ ID NO: 22495 - RNA, 20 nt, Artificial Sequence
  HTT spacer sequence GTCN PAM
ugcgcuuuccagagagagac

SEQ ID NO: 22496 - RNA, 20 nt, Artificial Sequence
  HTT spacer sequence GTCN PAM
cucucuggaaagcgcaagac

SEQ ID NO: 22497 - RNA, 20 nt, Artificial Sequence
  HTT spacer sequence GTCN PAM
gucucucucuggaaagcgca

SEQ ID NO: 22498 - RNA, 20 nt, Artificial Sequence
  HTT spacer sequence GTCN PAM
agccauggcuugaacaccuc

SEQ ID NO: 22499 - RNA, 20 nt, Artificial Sequence
  HTT spacer sequence GTCN PAM
ggcuuuguucuuguugggag

SEQ ID NO: 22500 - RNA, 20 nt, Artificial Sequence
  HTT spacer sequence GTCN PAM
uugucaccuuccucaccucc

SEQ ID NO: 22501 - RNA, 20 nt, Artificial Sequence
  HTT spacer sequence GTCN PAM
ccuuccucaccuccccaguc

SEQ ID NO: 22502 - RNA, 20 nt, Artificial Sequence
  HTT spacer sequence GTCN PAM
uagucugguuaauccuuaca

SEQ ID NO: 22503 - RNA, 20 nt, Artificial Sequence
  HTT spacer sequence GTCN PAM
gguuaauccuuacaucucac

SEQ ID NO: 22504 - RNA, 20 nt, Artificial Sequence
  HTT spacer sequence GTCN PAM
ccguggcuagaugugaccuc

SEQ ID NO: 22505 - RNA, 20 nt, Artificial Sequence
  HTT spacer sequence GTCN PAM
caucuagccacggugaccgu

SEQ ID NO: 22506 - RNA, 20 nt, Artificial Sequence
  HTT spacer sequence GTCN PAM
cugugaucucaugaggugug

SEQ ID NO: 22507 - RNA, 20 nt, Artificial Sequence
  HTT spacer sequence GTCN PAM
aguucacaccucaugagauc

SEQ ID NO: 22508 - RNA, 20 nt, Artificial Sequence
  HTT spacer sequence GTCN PAM
uuagccggcaucccaggaaa

SEQ ID NO: 22509 - RNA, 20 nt, Artificial Sequence
  HTT spacer sequence GTCN PAM
uccccuggggaaugccucgg

SEQ ID NO: 22510 - RNA, 20 nt, Artificial Sequence
  HTT spacer sequence GTCN PAM
ugcaggccgaggcauucccc

SEQ ID NO: 22511 - RNA, 20 nt, Artificial Sequence
  HTT spacer sequence GTCN PAM
caacaagccuugcaccacga

SEQ ID NO: 22512 - RNA, 20 nt, Artificial Sequence
  HTT spacer sequence GTCN PAM
cucccggguccagcacaccu

SEQ ID NO: 22513 - RNA, 20 nt, Artificial Sequence
  HTT spacer sequence GTCN PAM
agcacaccugagggcugacc

SEQ ID NO: 22514 - RNA, 20 nt, Artificial Sequence
  HTT spacer sequence GTCN PAM
gcccucaggugugcuggacc

SEQ ID NO: 22515 - RNA, 20 nt, Artificial Sequence
  HTT spacer sequence GTCN PAM
ugcguaacuugcacaucuuc

SEQ ID NO: 22516 - RNA, 20 nt, Artificial Sequence
  HTT spacer sequence GTCN PAM
gaaucagaagaugugcaagu

SEQ ID NO: 22517 - RNA, 20 nt, Artificial Sequence
  HTT spacer sequence GTCN PAM
gcacagacgcaacccagucu

SEQ ID NO: 22518 - RNA, 20 nt, Artificial Sequence
  HTT spacer sequence GTCN PAM
gugccgaccugggaugcagu

SEQ ID NO: 22519 - RNA, 20 nt, Artificial Sequence
  HTT spacer sequence GTCN PAM
ccucccaccuccgagagugc

SEQ ID NO: 22520 - RNA, 20 nt, Artificial Sequence
  HTT spacer sequence GTCN PAM
ugaauggagaaccccagcac

SEQ ID NO: 22521 - RNA, 20 nt, Artificial Sequence
  HTT spacer sequence GTCN PAM
uucaguggaugcuucugggu

SEQ ID NO: 22522 - RNA, 20 nt, Artificial Sequence
  HTT spacer sequence GTCN PAM
uacuuacguccuucagugga

SEQ ID NO: 22523 - RNA, 20 nt, Artificial Sequence
  HTT spacer sequence GTCN PAM
cucugcuggaacagccacag

SEQ ID NO: 22524 - RNA, 20 nt, Artificial Sequence
  HTT spacer sequence GTCN PAM
gugguugacagaaauuacac

SEQ ID NO: 22525 - RNA, 20 nt, Artificial Sequence
  HTT spacer sequence GTCN PAM
accacggacguuugccuuca

SEQ ID NO: 22526 - RNA, 20 nt, Artificial Sequence
  HTT spacer sequence GTCN PAM
ccaugaggcuuguccagacg

SEQ ID NO: 22527 - RNA, 20 nt, Artificial Sequence
  HTT spacer sequence GTCN PAM
agacgcagugaaccagucgc

SEQ ID NO: 22528 - RNA, 20 nt, Artificial Sequence
  HTT spacer sequence GTCN PAM
ggacaagccucauggggacu

SEQ ID NO: 22529 - RNA, 20 nt, Artificial Sequence
  HTT spacer sequence GTCN PAM
cagcugauaacacacagacc

SEQ ID NO: 22530 - RNA, 20 nt, Artificial Sequence
  HTT spacer sequence GTCN PAM
guguguuaucagcugcgacu

SEQ ID NO: 22531 - RNA, 20 nt, Artificial Sequence
  HTT spacer sequence GTCN PAM
ccugaugaaauagaaugaau

SEQ ID NO: 22532 - RNA, 20 nt, Artificial Sequence
  HTT spacer sequence GTCN PAM
ggaauucgagaccagccuga

SEQ ID NO: 22533 - RNA, 20 nt, Artificial Sequence
  HTT spacer sequence GTCN PAM
guccccaccucucagccaga

SEQ ID NO: 22534 - RNA, 20 nt, Artificial Sequence
  HTT spacer sequence GTCN PAM
ccaccucucagccagagccu

SEQ ID NO: 22535 - RNA, 20 nt, Artificial Sequence
  HTT spacer sequence GTCN PAM
ucugcucaacugcagaacug

SEQ ID NO: 22536 - RNA, 20 nt, Artificial Sequence
  HTT spacer sequence GTCN PAM
gccaguucugcaguugagca

SEQ ID NO: 22537 - RNA, 20 nt, Artificial Sequence
  HTT spacer sequence GTCN PAM
gcucccacugagcccacagc

SEQ ID NO: 22538 - RNA, 20 nt, Artificial Sequence
  HTT spacer sequence GTCN PAM
aagugugggugcuggcagca

SEQ ID NO: 22539 - RNA, 20 nt, Artificial Sequence
  HTT spacer sequence GTCN PAM
cacugaagcuuuucacaccc

SEQ ID NO: 22540 - RNA, 20 nt, Artificial Sequence
  HTT spacer sequence GTCN PAM
gcggccggcagagcugcuuc

SEQ ID NO: 22541 - RNA, 20 nt, Artificial Sequence
  HTT spacer sequence GTCN PAM
gugugcucugacacagcucc

SEQ ID NO: 22542 - RNA, 20 nt, Artificial Sequence
  HTT spacer sequence GTCN PAM
gagcacacugaccgaaaugg

SEQ ID NO: 22543 - RNA, 20 nt, Artificial Sequence
  HTT spacer sequence GTCN PAM
gggauuucguguuuuucagg

SEQ ID NO: 22544 - RNA, 20 nt, Artificial Sequence
  HTT spacer sequence GTCN PAM
ucgcagagucggggauuucg

SEQ ID NO: 22545 - RNA, 20 nt, Artificial Sequence
  HTT spacer sequence GTCN PAM
aggcagcgugaggacagugc

SEQ ID NO: 22546 - RNA, 20 nt, Artificial Sequence
  HTT spacer sequence GTCN PAM
ucacgcugccuugacaccac

SEQ ID NO: 22547 - RNA, 20 nt, Artificial Sequence
  HTT spacer sequence GTCN PAM
uggcacagccggaacgaagu

SEQ ID NO: 22548 - RNA, 20 nt, Artificial Sequence
  HTT spacer sequence GTCN PAM
ucuugaagagggagggccgu

SEQ ID NO: 22549 - RNA, 20 nt, Artificial Sequence
  HTT spacer sequence GTCN PAM
ccuccuuucagagagugcuc

SEQ ID NO: 22550 - RNA, 20 nt, Artificial Sequence
  HTT spacer sequence GTCN PAM
ccauagccugugcuccucac

SEQ ID NO: 22551 - RNA, 20 nt, Artificial Sequence
  HTT spacer sequence GTCN PAM
acagaaccccucuuucccag

SEQ ID NO: 22552 - RNA, 20 nt, Artificial Sequence
  HTT spacer sequence GTCN PAM
gggaaagagggguucuguug

SEQ ID NO: 22553 - RNA, 20 nt, Artificial Sequence
  HTT spacer sequence GTCN PAM
acaccaucuuugcaaaauca

SEQ ID NO: 22554 - RNA, 20 nt, Artificial Sequence
  HTT spacer sequence GTCN PAM
uuugaugcugcagcuguaag

SEQ ID NO: 22555 - RNA, 20 nt, Artificial Sequence
  HTT spacer sequence GTCN PAM
gucauuugaugcugcagcug

SEQ ID NO: 22556 - RNA, 20 nt, Artificial Sequence
  HTT spacer sequence GTCN PAM
gccaggugauccgugaggag

SEQ ID NO: 22557 - RNA, 20 nt, Artificial Sequence
  HTT spacer sequence GTCN PAM
cugccauccuuccacgccau

SEQ ID NO: 22558 - RNA, 20 nt, Artificial Sequence
  HTT spacer sequence GTCN PAM
ugccuggcugugggccuggc

SEQ ID NO: 22559 - RNA, 20 nt, Artificial Sequence
  HTT spacer sequence GTCN PAM
gugagggcaggaggcaagag

SEQ ID NO: 22560 - RNA, 20 nt, Artificial Sequence
  HTT spacer sequence GTCN PAM
aacuuguucuguuugucacu

SEQ ID NO: 22561 - RNA, 20 nt, Artificial Sequence
  HTT spacer sequence GTCN PAM
ccucacauaccggaugugau

SEQ ID NO: 22562 - RNA, 20 nt, Artificial Sequence
  HTT spacer sequence GTCN PAM
aaguuggggcccucagucua

SEQ ID NO: 22563 - RNA, 20 nt, Artificial Sequence
  HTT spacer sequence GTCN PAM
acucgcccagcggagggaga

SEQ ID NO: 22564 - RNA, 20 nt, Artificial Sequence
  HTT spacer sequence GTCN PAM
gcuagagaggauguggccac

SEQ ID NO: 22565 - RNA, 20 nt, Artificial Sequence
  HTT spacer sequence GTCN PAM
cacuuggaauucagguucca

SEQ ID NO: 22566 - RNA, 20 nt, Artificial Sequence
  HTT spacer sequence GTCN PAM
ugucgcacuuggaauucagg

SEQ ID NO: 22567 - RNA, 20 nt, Artificial Sequence
  HTT spacer sequence GTCN PAM
cagagguuuauaccugagcu

SEQ ID NO: 22568 - RNA, 20 nt, Artificial Sequence
  HTT spacer sequence GTCN PAM
uggagggacaggauggggca

SEQ ID NO: 22569 - RNA, 20 nt, Artificial Sequence
  HTT spacer sequence GTCN PAM
cuccaggacguggugaaggg

SEQ ID NO: 22570 - RNA, 20 nt, Artificial Sequence
  HTT spacer sequence GTCN PAM
ugggacgaugucaugccaug

SEQ ID NO: 22571 - RNA, 20 nt, Artificial Sequence
  HTT spacer sequence GTCN PAM
caggacaguaaccccccaua

SEQ ID NO: 22572 - RNA, 20 nt, Artificial Sequence
  HTT spacer sequence GTCN PAM
gccugcugcaccacgggugg

SEQ ID NO: 22573 - RNA, 20 nt, Artificial Sequence
  HTT spacer sequence GTCN PAM
gcugcucaccaaggugcguu

SEQ ID NO: 22574 - RNA, 20 nt, Artificial Sequence
  HTT spacer sequence GTCN PAM
ccacugggugccagaagucg

SEQ ID NO: 22575 - RNA, 20 nt, Artificial Sequence
  HTT spacer sequence GTCN PAM
gaaguuggaaauagcagccc

SEQ ID NO: 22576 - RNA, 20 nt, Artificial Sequence
  HTT spacer sequence GTCN PAM
aggcacugccccugccacag

SEQ ID NO: 22577 - RNA, 20 nt, Artificial Sequence
  HTT spacer sequence GTCN PAM
caaucauuucuuccaucuca

SEQ ID NO: 22578 - RNA, 20 nt, Artificial Sequence
  HTT spacer sequence GTCN PAM
cuugcagauucaggaaacau

SEQ ID NO: 22579 - RNA, 20 nt, Artificial Sequence
  HTT spacer sequence GTCN PAM
ggagagaaugacuuuagaua

SEQ ID NO: 22580 - RNA, 20 nt, Artificial Sequence
  HTT spacer sequence GTCN PAM
uucucuccugacuuuacauu

SEQ ID NO: 22581 - RNA, 20 nt, Artificial Sequence
  HTT spacer sequence GTCN PAM
ucugggaugugggguuaagc

SEQ ID NO: 22582 - RNA, 20 nt, Artificial Sequence
  HTT spacer sequence GTCN PAM
uugauaaguugguuguguaa

SEQ ID NO: 22583 - RNA, 20 nt, Artificial Sequence
  HTT spacer sequence GTCN PAM
ggugggucaucuguagccaa

SEQ ID NO: 22584 - RNA, 20 nt, Artificial Sequence
  HTT spacer sequence GTCN PAM
ucuguagccaaaucgccaac

SEQ ID NO: 22585 - RNA, 20 nt, Artificial Sequence
  HTT spacer sequence GTCN PAM
cgcagaaggaaacaaagcaa

SEQ ID NO: 22586 - RNA, 20 nt, Artificial Sequence
  HTT spacer sequence GTCN PAM
cgcucuguugcccaggcugg

SEQ ID NO: 22587 - RNA, 20 nt, Artificial Sequence
  HTT spacer sequence GTCN PAM
cugguagcuuuuccagcucu

SEQ ID NO: 22588 - RNA, 20 nt, Artificial Sequence
  HTT spacer sequence GTCN PAM
aaguggcuaucugggcuguc

SEQ ID NO: 22589 - RNA, 20 nt, Artificial Sequence
  HTT spacer sequence GTCN PAM
cucuccucuguguccucccc

SEQ ID NO: 22590 - RNA, 20 nt, Artificial Sequence
  HTT spacer sequence GTCN PAM
uccccgccugaacugucacc

SEQ ID NO: 22591 - RNA, 20 nt, Artificial Sequence
  HTT spacer sequence GTCN PAM
ccuucuuccucguugcucuc

SEQ ID NO: 22592 - RNA, 20 nt, Artificial Sequence
  HTT spacer sequence GTCN PAM
cuggcuuccuugcuuugcuc

SEQ ID NO: 22593 - RNA, 20 nt, Artificial Sequence
  HTT spacer sequence GTCN PAM
aggaagagcaaagcaaggaa

SEQ ID NO: 22594 - RNA, 20 nt, Artificial Sequence
  HTT spacer sequence GTCN PAM
aggaagauguccaggaagag

SEQ ID NO: 22595 - RNA, 20 nt, Artificial Sequence
  HTT spacer sequence GTCN PAM
ucaugcccugugguuuccac

SEQ ID NO: 22596 - RNA, 20 nt, Artificial Sequence
  HTT spacer sequence GTCN PAM
ucuuuaucuagcacgaagcc

SEQ ID NO: 22597 - RNA, 20 nt, Artificial Sequence
  HTT spacer sequence GTCN PAM
gcagaugaucugaaugaugg

SEQ ID NO: 22598 - RNA, 20 nt, Artificial Sequence
  HTT spacer sequence GTCN PAM
cucagccugagcaggaagga

SEQ ID NO: 22599 - RNA, 20 nt, Artificial Sequence
  HTT spacer sequence GTCN PAM
uagagcacacucuuccaaca

SEQ ID NO: 22600 - RNA, 20 nt, Artificial Sequence
  HTT spacer sequence GTCN PAM
ucauccuguuagagggcugc

SEQ ID NO: 22601 - RNA, 20 nt, Artificial Sequence
  HTT spacer sequence GTCN PAM
uaugcaucgggcuaagguag

SEQ ID NO: 22602 - RNA, 20 nt, Artificial Sequence
  HTT spacer sequence GTCN PAM
cuguucucugacuugggagu

SEQ ID NO: 22603 - RNA, 20 nt, Artificial Sequence
  HTT spacer sequence GTCN PAM
gagaacagagacaaaaagga

SEQ ID NO: 22604 - RNA, 20 nt, Artificial Sequence
  HTT spacer sequence GTCN PAM
cacaaaacucccaagucaga

SEQ ID NO: 22605 - RNA, 20 nt, Artificial Sequence
  HTT spacer sequence GTCN PAM
gaauuucuuuccagucuugg

SEQ ID NO: 22606 - RNA, 20 nt, Artificial Sequence
  HTT spacer sequence GTCN PAM
uggucuagcuucuccgugag

SEQ ID NO: 22607 - RNA, 20 nt, Artificial Sequence
  HTT spacer sequence GTCN PAM
agcuucuccgugagcucgag

SEQ ID NO: 22608 - RNA, 20 nt, Artificial Sequence
  HTT spacer sequence GTCN PAM
cucccucuggggaaaaaaua

SEQ ID NO: 22609 - RNA, 20 nt, Artificial Sequence
  HTT spacer sequence GTCN PAM
guuauuuuuuccccagaggg

SEQ ID NO: 22610 - RNA, 20 nt, Artificial Sequence
  HTT spacer sequence GTCN PAM
aaacaagagaagguggguua

SEQ ID NO: 22611 - RNA, 20 nt, Artificial Sequence
  HTT spacer sequence GTCN PAM
cggaaagagcugauugaaga

SEQ ID NO: 22612 - RNA, 20 nt, Artificial Sequence
  HTT spacer sequence GTCN PAM
ucuugugaaggagcccaccg

SEQ ID NO: 22613 - RNA, 20 nt, Artificial Sequence
  HTT spacer sequence GTCN PAM
gcucagcugggggcaaaagg

SEQ ID NO: 22614 - RNA, 20 nt, Artificial Sequence
  HTT spacer sequence GTCN PAM
ccaggcccugcccagggagg

SEQ ID NO: 22615 - RNA, 20 nt, Artificial Sequence
  HTT spacer sequence GTCN PAM
ccuguaccacggcgcccccu

SEQ ID NO: 22616 - RNA, 20 nt, Artificial Sequence
  HTT spacer sequence GTCN PAM
ccugcacgccacggcgcccc

SEQ ID NO: 22617 - RNA, 20 nt, Artificial Sequence
  HTT spacer sequence GTCN PAM
guuuuagauuuguacaccuu

SEQ ID NO: 22618 - RNA, 20 nt, Artificial Sequence
  HTT spacer sequence GTCN PAM
cauuuccagcaucuucagaa

SEQ ID NO: 22619 - RNA, 20 nt, Artificial Sequence
  HTT spacer sequence GTCN PAM
gagcuguggggagaacccac

SEQ ID NO: 22620 - RNA, 20 nt, Artificial Sequence
  HTT spacer sequence GTCN PAM
ggugaggcuggggugcugug

SEQ ID NO: 22621 - RNA, 20 nt, Artificial Sequence
  HTT spacer sequence GTCN PAM
cuguccacaaugucauuaug

SEQ ID NO: 22622 - RNA, 20 nt, Artificial Sequence
  HTT spacer sequence GTCN PAM
acaaugucauuaugcuucuc

SEQ ID NO: 22623 - RNA, 20 nt, Artificial Sequence
  HTT spacer sequence GTCN PAM
uuaugcuucucgaugucugc

SEQ ID NO: 22624 - RNA, 20 nt, Artificial Sequence
  HTT spacer sequence GTCN PAM
gccaaagacuggccauaaug

SEQ ID NO: 22625 - RNA, 20 nt, Artificial Sequence
  HTT spacer sequence GTCN PAM
uuggcagacaucgagaagca

SEQ ID NO: 22626 - RNA, 20 nt, Artificial Sequence
  HTT spacer sequence GTCN PAM
auucuucaucuucauuuaga

SEQ ID NO: 22627 - RNA, 20 nt, Artificial Sequence
  HTT spacer sequence GTCN PAM
cugacagaagagaaaaaaag

SEQ ID NO: 22628 - RNA, 20 nt, Artificial Sequence
  HTT spacer sequence GTCN PAM
gcgacaucaugagaaaaaaa

SEQ ID NO: 22629 - RNA, 20 nt, Artificial Sequence
  HTT spacer sequence GTCN PAM
guguacgcuggaaaacaggu

SEQ ID NO: 22630 - RNA, 20 nt, Artificial Sequence
  HTT spacer sequence GTCN PAM
gaaacaaucucacaaaaaau

SEQ ID NO: 22631 - RNA, 20 nt, Artificial Sequence
  HTT spacer sequence GTCN PAM
uggagguugaauucccuaaa

SEQ ID NO: 22632 - RNA, 20 nt, Artificial Sequence
  HTT spacer sequence GTCN PAM
ucucacagcuuucuuuaggg

SEQ ID NO: 22633 - RNA, 20 nt, Artificial Sequence
  HTT spacer sequence GTCN PAM
agcuggcaaucagaugggag

SEQ ID NO: 22634 - RNA, 20 nt, Artificial Sequence
  HTT spacer sequence GTCN PAM
guacagaguucaucgagcag

SEQ ID NO: 22635 - RNA, 20 nt, Artificial Sequence
  HTT spacer sequence GTCN PAM
cuggcuucuagcaggaaggg

SEQ ID NO: 22636 - RNA, 20 nt, Artificial Sequence
  HTT spacer sequence GTCN PAM
caacaucuauauaguuuaag

SEQ ID NO: 22637 - RNA, 20 nt, Artificial Sequence
  HTT spacer sequence GTCN PAM
cuuacaguuggucaggccuu

SEQ ID NO: 22638 - RNA, 20 nt, Artificial Sequence
  HTT spacer sequence GTCN PAM
cgcgcacgggcccucaggaa

SEQ ID NO: 22639 - RNA, 20 nt, Artificial Sequence
  HTT spacer sequence GTCN PAM
cacgucguggcgcgucuucc

SEQ ID NO: 22640 - RNA, 20 nt, Artificial Sequence
  HTT spacer sequence GTCN PAM
uggcgcgucuuccggcccag

SEQ ID NO: 22641 - RNA, 20 nt, Artificial Sequence
  HTT spacer sequence GTCN PAM
uccggcccaggaucuggaac

SEQ ID NO: 22642 - RNA, 20 nt, Artificial Sequence
  HTT spacer sequence GTCN PAM
gggcgcgaaggaaggccucc

SEQ ID NO: 22643 - RNA, 20 nt, Artificial Sequence
  HTT spacer sequence GTCN PAM
cgggcccuugggcgcagcgg

SEQ ID NO: 22644 - RNA, 20 nt, Artificial Sequence
  HTT spacer sequence GTCN PAM
uaggguagcgcgcgccuguc

SEQ ID NO: 22645 - RNA, 20 nt, Artificial Sequence
  HTT spacer sequence GTCN PAM
cgcgagaacagcgcagcacc

SEQ ID NO: 22646 - RNA, 20 nt, Artificial Sequence
  HTT spacer sequence GTCN PAM
gaggugcugcgcuguucucg

SEQ ID NO: 22647 - RNA, 20 nt, Artificial Sequence
  HTT spacer sequence GTCN PAM
cugagccuaucggcgaguaa

SEQ ID NO: 22648 - RNA, 20 nt, Artificial Sequence
  HTT spacer sequence GTCN PAM
ccggccgcggcgggcgcccc

SEQ ID NO: 22649 - RNA, 20 nt, Artificial Sequence
  HTT spacer sequence GTCN PAM
ccgcugccgcgcuaucgccc

SEQ ID NO: 22650 - RNA, 20 nt, Artificial Sequence
  HTT spacer sequence GTCN PAM
cagcugucaccgcugccgcg

SEQ ID NO: 22651 - RNA, 20 nt, Artificial Sequence
  HTT spacer sequence GTCN PAM
ggcugcccccuccccucgcc

SEQ ID NO: 22652 - RNA, 20 nt, Artificial Sequence
  HTT spacer sequence GTCN PAM
ccucggucucgcagaauccg

SEQ ID NO: 22653 - RNA, 20 nt, Artificial Sequence
  HTT spacer sequence GTCN PAM
cgcagaauccgccggcggcg

SEQ ID NO: 22654 - RNA, 20 nt, Artificial Sequence
  HTT spacer sequence GTCN PAM
uggcgccgccgccgccggcg

SEQ ID NO: 22655 - RNA, 20 nt, Artificial Sequence
  HTT spacer sequence GTCN PAM
aggugggugcgcggcaggcg

SEQ ID NO: 22656 - RNA, 20 nt, Artificial Sequence
  HTT spacer sequence GTCN PAM
ggggcgccugccgcgcaccc

SEQ ID NO: 22657 - RNA, 20 nt, Artificial Sequence
  HTT spacer sequence GTCN PAM
cggaccucaugucucccuug

SEQ ID NO: 22658 - RNA, 20 nt, Artificial Sequence
  HTT spacer sequence GTCN PAM
gagacagaggauugcacaga

SEQ ID NO: 22659 - RNA, 20 nt, Artificial Sequence
  HTT spacer sequence GTCN PAM
cccuugccugcgucucaaga

SEQ ID NO: 22660 - RNA, 20 nt, Artificial Sequence
  HTT spacer sequence GTCN PAM
caagagagcuggcgacagag

SEQ ID NO: 22661 - RNA, 20 nt, Artificial Sequence
  HTT spacer sequence GTCN PAM
ccagcucucuugagacgcag

SEQ ID NO: 22662 - RNA, 20 nt, Artificial Sequence
  HTT spacer sequence GTCN PAM
gaggcucugucgccagcucu

SEQ ID NO: 22663 - RNA, 20 nt, Artificial Sequence
  HTT spacer sequence GTCN PAM
cugugcuagccacgguaguu

SEQ ID NO: 22664 - RNA, 20 nt, Artificial Sequence
  HTT spacer sequence GTCN PAM
cacuauguugcccaggcuag

SEQ ID NO: 22665 - RNA, 20 nt, Artificial Sequence
  HTT spacer sequence GTCN PAM
ggaaccccuggacucaagug

SEQ ID NO: 22666 - RNA, 20 nt, Artificial Sequence
  HTT spacer sequence GTCN PAM
agggguuccagacuagccug

SEQ ID NO: 22667 - RNA, 20 nt, Artificial Sequence
  HTT spacer sequence GTCN PAM
gauauuugaaguaaucuaug

SEQ ID NO: 22668 - RNA, 20 nt, Artificial Sequence
  HTT spacer sequence GTCN PAM
gccaaauuauuucucugcca

SEQ ID NO: 22669 - RNA, 20 nt, Artificial Sequence
  HTT spacer sequence GTCN PAM
accgucuguuacuaucauua

SEQ ID NO: 22670 - RNA, 20 nt, Artificial Sequence
  HTT spacer sequence GTCN PAM
aaauauaaagcucaagaaca

SEQ ID NO: 22671 - RNA, 20 nt, Artificial Sequence
  HTT spacer sequence GTCN PAM
aaaucauuuuggcuuuauua

SEQ ID NO: 22672 - RNA, 20 nt, Artificial Sequence
  HTT spacer sequence GTCN PAM
uggucauaaagacuaauuug

SEQ ID NO: 22673 - RNA, 20 nt, Artificial Sequence
  HTT spacer sequence GTCN PAM
uaaagacuaauuugguaaca

SEQ ID NO: 22674 - RNA, 20 nt, Artificial Sequence
  HTT spacer sequence GTCN PAM
uuaugaccaugacauaaaug

SEQ ID NO: 22675 - RNA, 20 nt, Artificial Sequence
  HTT spacer sequence GTCN PAM
ccaguaaauaugugguuaau

SEQ ID NO: 22676 - RNA, 20 nt, Artificial Sequence
  HTT spacer sequence GTCN PAM
cauauuacauuuuugugcuu

SEQ ID NO: 22677 - RNA, 20 nt, Artificial Sequence
  HTT spacer sequence GTCN PAM
aauuuuccauuuuuauaagg

SEQ ID NO: 22678 - RNA, 20 nt, Artificial Sequence
  HTT spacer sequence GTCN PAM
uuagggugggcccuaaucca

SEQ ID NO: 22679 - RNA, 20 nt, Artificial Sequence
  HTT spacer sequence GTCN PAM
cuauaaauacccuaucucca

SEQ ID NO: 22680 - RNA, 20 nt, Artificial Sequence
  HTT spacer sequence GTCN PAM
gaggguuaggggcuaacugg

SEQ ID NO: 22681 - RNA, 20 nt, Artificial Sequence
  HTT spacer sequence GTCN PAM
ggcuggcuccaaagcccaug

SEQ ID NO: 22682 - RNA, 20 nt, Artificial Sequence
  HTT spacer sequence GTCN PAM
guuacuucaguuucacucaa

SEQ ID NO: 22683 - RNA, 20 nt, Artificial Sequence
  HTT spacer sequence GTCN PAM
uuucagaguuacuucccuug

SEQ ID NO: 22684 - RNA, 20 nt, Artificial Sequence
  HTT spacer sequence GTCN PAM
gcuuuuuguucucugugucu

SEQ ID NO: 22685 - RNA, 20 nt, Artificial Sequence
  HTT spacer sequence GTCN PAM
gcuugcuucagcccuuuucu

SEQ ID NO: 22686 - RNA, 20 nt, Artificial Sequence
  HTT spacer sequence GTCN PAM
guugcuguauuaaucuaucc

SEQ ID NO: 22687 - RNA, 20 nt, Artificial Sequence
  HTT spacer sequence GTCN PAM
gccaaauaaaagcuuccucu

SEQ ID NO: 22688 - RNA, 20 nt, Artificial Sequence
  HTT spacer sequence GTCN PAM
cagcugcugaggaggcugag

SEQ ID NO: 22689 - RNA, 20 nt, Artificial Sequence
  HTT spacer sequence GTCN PAM
aggaagucaaggcugcagug

SEQ ID NO: 22690 - RNA, 20 nt, Artificial Sequence
  HTT spacer sequence GTCN PAM
aggcugcagugagacuugca

SEQ ID NO: 22691 - RNA, 20 nt, Artificial Sequence
  HTT spacer sequence GTCN PAM
cacugcagccuugacuuccu

SEQ ID NO: 22692 - RNA, 20 nt, Artificial Sequence
  HTT spacer sequence GTCN PAM
cccaggcuagaaugcagaau

SEQ ID NO: 22693 - RNA, 20 nt, Artificial Sequence
  HTT spacer sequence GTCN PAM
ugcucugucacccaggcuag

SEQ ID NO: 22694 - RNA, 20 nt, Artificial Sequence
  HTT spacer sequence GTCN PAM
uucacuacugguccagaucc

SEQ ID NO: 22695 - RNA, 20 nt, Artificial Sequence
  HTT spacer sequence GTCN PAM
agaucccaugccugccaagg

SEQ ID NO: 22696 - RNA, 20 nt, Artificial Sequence
  HTT spacer sequence GTCN PAM
guguaccucauucuuccugg

SEQ ID NO: 22697 - RNA, 20 nt, Artificial Sequence
  HTT spacer sequence GTCN PAM
cucaauaaagcaccucuucu

SEQ ID NO: 22698 - RNA, 20 nt, Artificial Sequence
  HTT spacer sequence GTCN PAM
ccugagagcuguacugucac

SEQ ID NO: 22699 - RNA, 20 nt, Artificial Sequence
  HTT spacer sequence GTCN PAM
gugcagcccucagaggagag

SEQ ID NO: 22700 - RNA, 20 nt, Artificial Sequence
  HTT spacer sequence GTCN PAM
ggcuucagucuaucccuggc

SEQ ID NO: 22701 - RNA, 20 nt, Artificial Sequence
  HTT spacer sequence GTCN PAM
aucccuggcuugaaggugag

SEQ ID NO: 22702 - RNA, 20 nt, Artificial Sequence
  HTT spacer sequence GTCN PAM
ccagugaaaccucaccuuca

SEQ ID NO: 22703 - RNA, 20 nt, Artificial Sequence
  HTT spacer sequence GTCN PAM
gccuccugcccuuguucaug

SEQ ID NO: 22704 - RNA, 20 nt, Artificial Sequence
  HTT spacer sequence GTCN PAM
aaagucuggagggggcugag

SEQ ID NO: 22705 - RNA, 20 nt, Artificial Sequence
  HTT spacer sequence GTCN PAM
ggagggggcugagguggcag

SEQ ID NO: 22706 - RNA, 20 nt, Artificial Sequence
  HTT spacer sequence GTCN PAM
uauucauauuucacuaucuc

SEQ ID NO: 22707 - RNA, 20 nt, Artificial Sequence
  HTT spacer sequence GTCN PAM
cucuuggucuuauucauauu

SEQ ID NO: 22708 - RNA, 20 nt, Artificial Sequence
  HTT spacer sequence GTCN PAM
cagggcacuuguagaucaug

SEQ ID NO: 22709 - RNA, 20 nt, Artificial Sequence
  HTT spacer sequence GTCN PAM
cuugccugaugcaguauuuu

SEQ ID NO: 22710 - RNA, 20 nt, Artificial Sequence
  HTT spacer sequence GTCN PAM
agggugaacauguugaaugc

SEQ ID NO: 22711 - RNA, 20 nt, Artificial Sequence
  HTT spacer sequence GTCN PAM
agagcaccuggcauucaaca

SEQ ID NO: 22712 - RNA, 20 nt, Artificial Sequence
  HTT spacer sequence GTCN PAM
cacaccacaagauguccaga

SEQ ID NO: 22713 - RNA, 20 nt, Artificial Sequence
  HTT spacer sequence GTCN PAM
agagcucaugaucucaguug

SEQ ID NO: 22714 - RNA, 20 nt, Artificial Sequence
  HTT spacer sequence GTCN PAM
uguuagaucuuguuuacaga

SEQ ID NO: 22715 - RNA, 20 nt, Artificial Sequence
  HTT spacer sequence GTCN PAM
uaguaaaaaauggaaggaga

SEQ ID NO: 22716 - RNA, 20 nt, Artificial Sequence
  HTT spacer sequence GTCN PAM
guaucuccuuccauuuuuua

SEQ ID NO: 22717 - RNA, 20 nt, Artificial Sequence
  HTT spacer sequence GTCN PAM
gccagugcagugagcuuaga

SEQ ID NO: 22718 - RNA, 20 nt, Artificial Sequence
  HTT spacer sequence GTCN PAM
aagcucacugcacuggcuga

SEQ ID NO: 22719 - RNA, 20 nt, Artificial Sequence
  HTT spacer sequence GTCN PAM
acagccaacuuuauaacugc

SEQ ID NO: 22720 - RNA, 20 nt, Artificial Sequence
  HTT spacer sequence GTCN PAM
caccauguugcccaggcugg

SEQ ID NO: 22721 - RNA, 20 nt, Artificial Sequence
  HTT spacer sequence GTCN PAM
uggggagaggaauuuuuacu

SEQ ID NO: 22722 - RNA, 20 nt, Artificial Sequence
  HTT spacer sequence GTCN PAM
guagaagaaacacuguuaag

SEQ ID NO: 22723 - RNA, 20 nt, Artificial Sequence
  HTT spacer sequence GTCN PAM
ggaaggcuacuaaacaauac

SEQ ID NO: 22724 - RNA, 20 nt, Artificial Sequence
  HTT spacer sequence GTCN PAM
guuccaaucuuuuauccguu

SEQ ID NO: 22725 - RNA, 20 nt, Artificial Sequence
  HTT spacer sequence GTCN PAM
uuuuguuguugagguauaag

SEQ ID NO: 22726 - RNA, 20 nt, Artificial Sequence
  HTT spacer sequence GTCN PAM
accacaugcuguucuaagcc

SEQ ID NO: 22727 - RNA, 20 nt, Artificial Sequence
  HTT spacer sequence GTCN PAM
uugugacaagcaaccgauag

SEQ ID NO: 22728 - RNA, 20 nt, Artificial Sequence
  HTT spacer sequence GTCN PAM
caaagacugcuauaauccuu

SEQ ID NO: 22729 - RNA, 20 nt, Artificial Sequence
  HTT spacer sequence GTCN PAM
uccuaucgguugcuugucac

SEQ ID NO: 22730 - RNA, 20 nt, Artificial Sequence
  HTT spacer sequence GTCN PAM
cuucaggcaguucugugaua

SEQ ID NO: 22731 - RNA, 20 nt, Artificial Sequence
  HTT spacer sequence GTCN PAM
ggagaucgagaccauccuga

SEQ ID NO: 22732 - RNA, 20 nt, Artificial Sequence
  HTT spacer sequence GTCN PAM
cgaucuccugaccucaugau

SEQ ID NO: 22733 - RNA, 20 nt, Artificial Sequence
  HTT spacer sequence GTCN PAM
ggauggucucgaucuccuga

SEQ ID NO: 22734 - RNA, 20 nt, Artificial Sequence
  HTT spacer sequence GTCN PAM
cuacuaaaauacaaaaaguu

SEQ ID NO: 22735 - RNA, 20 nt, Artificial Sequence
  HTT spacer sequence GTCN PAM
cagcuacuugggaggcugag

SEQ ID NO: 22736 - RNA, 20 nt, Artificial Sequence
  HTT spacer sequence GTCN PAM
ggauucaaccagagaacuag

SEQ ID NO: 22737 - RNA, 20 nt, Artificial Sequence
  HTT spacer sequence GTCN PAM
ucaggcagaauuucuuccuc

SEQ ID NO: 22738 - RNA, 20 nt, Artificial Sequence
  HTT spacer sequence GTCN PAM
uccuggaggaagaaauucug

SEQ ID NO: 22739 - RNA, 20 nt, Artificial Sequence
  HTT spacer sequence GTCN PAM
ucaucaucggcaacuucaua

SEQ ID NO: 22740 - RNA, 20 nt, Artificial Sequence
  HTT spacer sequence GTCN PAM
acaaucacuucgguccucau

SEQ ID NO: 22741 - RNA, 20 nt, Artificial Sequence
  HTT spacer sequence GTCN PAM
aucuuagauagauucuucaa

SEQ ID NO: 22742 - RNA, 20 nt, Artificial Sequence
  HTT spacer sequence GTCN PAM
ggcaucacacccagccaaau

SEQ ID NO: 22743 - RNA, 20 nt, Artificial Sequence
  HTT spacer sequence GTCN PAM
cacuauguuggccaugcuga

SEQ ID NO: 22744 - RNA, 20 nt, Artificial Sequence
  HTT spacer sequence GTCN PAM
agcuaguuuuuuuguuuauu

SEQ ID NO: 22745 - RNA, 20 nt, Artificial Sequence
  HTT spacer sequence GTCN PAM
ugaggaaacuaacaauuaga

SEQ ID NO: 22746 - RNA, 20 nt, Artificial Sequence
  HTT spacer sequence GTCN PAM
cucuuggacuaaaaauaaca

SEQ ID NO: 22747 - RNA, 20 nt, Artificial Sequence
  HTT spacer sequence GTCN PAM
aagagagacaaauaaaauuc

SEQ ID NO: 22748 - RNA, 20 nt, Artificial Sequence
  HTT spacer sequence GTCN PAM
acaacaccuugaacugggca

SEQ ID NO: 22749 - RNA, 20 nt, Artificial Sequence
  HTT spacer sequence GTCN PAM
cagcuucuucauuuuagguc

SEQ ID NO: 22750 - RNA, 20 nt, Artificial Sequence
  HTT spacer sequence GTCN PAM
aaguaaacucuuuaaauuac

SEQ ID NO: 22751 - RNA, 20 nt, Artificial Sequence
  HTT spacer sequence GTCN PAM
uucacauuuaaguaugaugu

SEQ ID NO: 22752 - RNA, 20 nt, Artificial Sequence
  HTT spacer sequence GTCN PAM
gguaaggcugcaagauacua

SEQ ID NO: 22753 - RNA, 20 nt, Artificial Sequence
  HTT spacer sequence GTCN PAM
cuauacaaaauuuaauugua

SEQ ID NO: 22754 - RNA, 20 nt, Artificial Sequence
  HTT spacer sequence GTCN PAM
uuccauuucuugagaucuuc

SEQ ID NO: 22755 - RNA, 20 nt, Artificial Sequence
  HTT spacer sequence GTCN PAM
ucugauccacgaacaggaga

SEQ ID NO: 22756 - RNA, 20 nt, Artificial Sequence
  HTT spacer sequence GTCN PAM
ugauuacuguagcuuuguac

SEQ ID NO: 22757 - RNA, 20 nt, Artificial Sequence
  HTT spacer sequence GTCN PAM
uggcaugaugguagacauac

SEQ ID NO: 22758 - RNA, 20 nt, Artificial Sequence
  HTT spacer sequence GTCN PAM
accaucaugccaggaccaua

SEQ ID NO: 22759 - RNA, 20 nt, Artificial Sequence
  HTT spacer sequence GTCN PAM
augguauggaaucgagagug

SEQ ID NO: 22760 - RNA, 20 nt, Artificial Sequence
  HTT spacer sequence GTCN PAM
ugauagaaucaaccugcuau

SEQ ID NO: 22761 - RNA, 20 nt, Artificial Sequence
  HTT spacer sequence GTCN PAM
caauuuuucugaaacuaaau

SEQ ID NO: 22762 - RNA, 20 nt, Artificial Sequence
  HTT spacer sequence GTCN PAM
uuacuaaaaaauacaaaaau

SEQ ID NO: 22763 - RNA, 20 nt, Artificial Sequence
  HTT spacer sequence GTCN PAM
ugaacuccugaccucaacug

SEQ ID NO: 22764 - RNA, 20 nt, Artificial Sequence
  HTT spacer sequence GTCN PAM
ggaguucaagaccagccugg

SEQ ID NO: 22765 - RNA, 20 nt, Artificial Sequence
  HTT spacer sequence GTCN PAM
aaaagguuuauccaaguugu

SEQ ID NO: 22766 - RNA, 20 nt, Artificial Sequence
  HTT spacer sequence GTCN PAM
guggaugaauggauaaauaa

SEQ ID NO: 22767 - RNA, 20 nt, Artificial Sequence
  HTT spacer sequence GTCN PAM
caaacagguaucugcacacc

SEQ ID NO: 22768 - RNA, 20 nt, Artificial Sequence
  HTT spacer sequence GTCN PAM
cuacuaaaaauacaaaacua

SEQ ID NO: 22769 - RNA, 20 nt, Artificial Sequence
  HTT spacer sequence GTCN PAM
caaacuccugacuucaggug

SEQ ID NO: 22770 - RNA, 20 nt, Artificial Sequence
  HTT spacer sequence GTCN PAM
ggaguuugagaccagccaac

SEQ ID NO: 22771 - RNA, 20 nt, Artificial Sequence
  HTT spacer sequence GTCN PAM
caacaucuggagguauuucu

SEQ ID NO: 22772 - RNA, 20 nt, Artificial Sequence
  HTT spacer sequence GTCN PAM
caaucuacauucugucacaa

SEQ ID NO: 22773 - RNA, 20 nt, Artificial Sequence
  HTT spacer sequence GTCN PAM
gcaugcauacacaaggcacu

SEQ ID NO: 22774 - RNA, 20 nt, Artificial Sequence
  HTT spacer sequence GTCN PAM
cucaugucacagcggaggaa

SEQ ID NO: 22775 - RNA, 20 nt, Artificial Sequence
  HTT spacer sequence GTCN PAM
cagcggaggaaacggaggcc

SEQ ID NO: 22776 - RNA, 20 nt, Artificial Sequence
  HTT spacer sequence GTCN PAM
cuggcugggugccauggcuc

SEQ ID NO: 22777 - RNA, 20 nt, Artificial Sequence
  HTT spacer sequence GTCN PAM
ugggauauugugauaagaau

SEQ ID NO: 22778 - RNA, 20 nt, Artificial Sequence
  HTT spacer sequence GTCN PAM
ucaucugggaugccacagag

SEQ ID NO: 22779 - RNA, 20 nt, Artificial Sequence
  HTT spacer sequence GTCN PAM
acgcuuuuguccuucacauc

SEQ ID NO: 22780 - RNA, 20 nt, Artificial Sequence
  HTT spacer sequence GTCN PAM
uucacaucccucuccugggc

SEQ ID NO: 22781 - RNA, 20 nt, Artificial Sequence
  HTT spacer sequence GTCN PAM
cucagccagugaguggcuga

SEQ ID NO: 22782 - RNA, 20 nt, Artificial Sequence
  HTT spacer sequence GTCN PAM
gcuguucuguuaucaagcag

SEQ ID NO: 22783 - RNA, 20 nt, Artificial Sequence
  HTT spacer sequence GTCN PAM
cagcuacucaggaggcugag

SEQ ID NO: 22784 - RNA, 20 nt, Artificial Sequence
  HTT spacer sequence GTCN PAM
ugggcuuaagcaauccuuca

SEQ ID NO: 22785 - RNA, 20 nt, Artificial Sequence
  HTT spacer sequence GTCN PAM
auuaaauuagaagaaauggu

SEQ ID NO: 22786 - RNA, 20 nt, Artificial Sequence
  HTT spacer sequence GTCN PAM
ccagggcuggagugcagugg

SEQ ID NO: 22787 - RNA, 20 nt, Artificial Sequence
  HTT spacer sequence GTCN PAM
cacucugucgccagggcugg

SEQ ID NO: 22788 - RNA, 20 nt, Artificial Sequence
  HTT spacer sequence GTCN PAM
agagcuauccugcuagaggg

SEQ ID NO: 22789 - RNA, 20 nt, Artificial Sequence
  HTT spacer sequence GTCN PAM
cugagcacagacacccuuug

SEQ ID NO: 22790 - RNA, 20 nt, Artificial Sequence
  HTT spacer sequence GTCN PAM
gugcucagggacuguggcuc

SEQ ID NO: 22791 - RNA, 20 nt, Artificial Sequence
  HTT spacer sequence GTCN PAM
cgggcauccccuuugagcag

SEQ ID NO: 22792 - RNA, 20 nt, Artificial Sequence
  HTT spacer sequence GTCN PAM
ucgccucauuuauugaacca

SEQ ID NO: 22793 - RNA, 20 nt, Artificial Sequence
  HTT spacer sequence GTCN PAM
cacauugcauuguucuuuua

SEQ ID NO: 22794 - RNA, 20 nt, Artificial Sequence
  HTT spacer sequence GTCN PAM
aaauguguucuuuguuacgg

SEQ ID NO: 22795 - RNA, 20 nt, Artificial Sequence
  HTT spacer sequence GTCN PAM
ugagaacauggcuucaggua

SEQ ID NO: 22796 - RNA, 20 nt, Artificial Sequence
  HTT spacer sequence GTCN PAM
ccaagagaagggauucuuaa

SEQ ID NO: 22797 - RNA, 20 nt, Artificial Sequence
  HTT spacer sequence GTCN PAM
cuuugcccagauggaaagac

SEQ ID NO: 22798 - RNA, 20 nt, Artificial Sequence
  HTT spacer sequence GTCN PAM
uuccaucugggcaaagugac

SEQ ID NO: 22799 - RNA, 20 nt, Artificial Sequence
  HTT spacer sequence GTCN PAM
uaaauguauggaaauagaau

SEQ ID NO: 22800 - RNA, 20 nt, Artificial Sequence
  HTT spacer sequence GTCN PAM
caaauucacauaguacagag

SEQ ID NO: 22801 - RNA, 20 nt, Artificial Sequence
  HTT spacer sequence GTCN PAM
aaacagaguaggguuacgua

SEQ ID NO: 22802 - RNA, 20 nt, Artificial Sequence
  HTT spacer sequence GTCN PAM
auuugggaaaauccuaagga

SEQ ID NO: 22803 - RNA, 20 nt, Artificial Sequence
  HTT spacer sequence GTCN PAM
uuuccuuaggauuuucccaa

SEQ ID NO: 22804 - RNA, 20 nt, Artificial Sequence
  HTT spacer sequence GTCN PAM
gugagucauuuccuuaggau

SEQ ID NO: 22805 - RNA, 20 nt, Artificial Sequence
  HTT spacer sequence GTCN PAM
aggcaacaagagcgaaacuc

SEQ ID NO: 22806 - RNA, 20 nt, Artificial Sequence
  HTT spacer sequence GTCN PAM
ggguggucuugaacucccga

SEQ ID NO: 22807 - RNA, 20 nt, Artificial Sequence
  HTT spacer sequence GTCN PAM
ugaacucccgaccucgggug

SEQ ID NO: 22808 - RNA, 20 nt, Artificial Sequence
  HTT spacer sequence GTCN PAM
ggaguucaagaccacccuga

SEQ ID NO: 22809 - RNA, 20 nt, Artificial Sequence
  HTT spacer sequence GTCN PAM
ccuagauggagaccacugua

SEQ ID NO: 22810 - RNA, 20 nt, Artificial Sequence
  HTT spacer sequence GTCN PAM
ccaucuaggagacccaucau

SEQ ID NO: 22811 - RNA, 20 nt, Artificial Sequence
  HTT spacer sequence GTCN PAM
ggggauuuaaagagauauua

SEQ ID NO: 22812 - RNA, 20 nt, Artificial Sequence
  HTT spacer sequence GTCN PAM
cuaagagccaggcaagccau

SEQ ID NO: 22813 - RNA, 20 nt, Artificial Sequence
  HTT spacer sequence GTCN PAM
cacccgggcaguguaaccug

SEQ ID NO: 22814 - RNA, 20 nt, Artificial Sequence
  HTT spacer sequence GTCN PAM
gcuuucuaauuaacuucaag

SEQ ID NO: 22815 - RNA, 20 nt, Artificial Sequence
  HTT spacer sequence GTCN PAM
agcugcaggugcauaacaga

SEQ ID NO: 22816 - RNA, 20 nt, Artificial Sequence
  HTT spacer sequence GTCN PAM
ugucaagcugcaggugcaua

SEQ ID NO: 22817 - RNA, 20 nt, Artificial Sequence
  HTT spacer sequence GTCN PAM
cucugguacaguuccagaga

SEQ ID NO: 22818 - RNA, 20 nt, Artificial Sequence
  HTT spacer sequence GTCN PAM
cuggaacuguaccagaggga

SEQ ID NO: 22819 - RNA, 20 nt, Artificial Sequence
  HTT spacer sequence GTCN PAM
uagaacaggaaagucauuuu

SEQ ID NO: 22820 - RNA, 20 nt, Artificial Sequence
  HTT spacer sequence GTCN PAM
uuuucuuacuuggacucuug

SEQ ID NO: 22821 - RNA, 20 nt, Artificial Sequence
  HTT spacer sequence GTCN PAM
aaguaagaaaaugacuuucc

SEQ ID NO: 22822 - RNA, 20 nt, Artificial Sequence
  HTT spacer sequence GTCN PAM
uuacauuugcagaucauuaa

SEQ ID NO: 22823 - RNA, 20 nt, Artificial Sequence
  HTT spacer sequence GTCN PAM
uguguuuacaaaggaaugaa

SEQ ID NO: 22824 - RNA, 20 nt, Artificial Sequence
  HTT spacer sequence GTCN PAM
aauuauagccacauguaagu

SEQ ID NO: 22825 - RNA, 20 nt, Artificial Sequence
  HTT spacer sequence GTCN PAM
gucuuaauaggauauaauag

SEQ ID NO: 22826 - RNA, 20 nt, Artificial Sequence
  HTT spacer sequence GTCN PAM
uaauaggauauaauagggac

SEQ ID NO: 22827 - RNA, 20 nt, Artificial Sequence
  HTT spacer sequence GTCN PAM
cuauuauauccuauuaagac

SEQ ID NO: 22828 - RNA, 20 nt, Artificial Sequence
  HTT spacer sequence GTCN PAM
uucacaauagcuaaaauuug

SEQ ID NO: 22829 - RNA, 20 nt, Artificial Sequence
  HTT spacer sequence GTCN PAM
ugccauguugccuaggcuga

SEQ ID NO: 22830 - RNA, 20 nt, Artificial Sequence
  HTT spacer sequence GTCN PAM
uucuuaucuucuuuuuuaau

SEQ ID NO: 22831 - RNA, 20 nt, Artificial Sequence
  HTT spacer sequence GTCN PAM
gugggaaacugccaugcuuu

SEQ ID NO: 22832 - RNA, 20 nt, Artificial Sequence
  HTT spacer sequence GTCN PAM
aggcccagaggcagugagca

SEQ ID NO: 22833 - RNA, 20 nt, Artificial Sequence
  HTT spacer sequence GTCN PAM
gcucaccccuacucugaaug

SEQ ID NO: 22834 - RNA, 20 nt, Artificial Sequence
  HTT spacer sequence GTCN PAM
gaaggagcccugcuugcccu

SEQ ID NO: 22835 - RNA, 20 nt, Artificial Sequence
  HTT spacer sequence GTCN PAM
ccgcaugagggcaagcaggg

SEQ ID NO: 22836 - RNA, 20 nt, Artificial Sequence
  HTT spacer sequence GTCN PAM
acaguaauucuuucgcuuau

SEQ ID NO: 22837 - RNA, 20 nt, Artificial Sequence
  HTT spacer sequence GTCN PAM
uccgaaaugaauuuguaggg

SEQ ID NO: 22838 - RNA, 20 nt, Artificial Sequence
  HTT spacer sequence GTCN PAM
ugagugagcacaaugguaaa

SEQ ID NO: 22839 - RNA, 20 nt, Artificial Sequence
  HTT spacer sequence GTCN PAM
acucaauuccuuuaccauug

SEQ ID NO: 22840 - RNA, 20 nt, Artificial Sequence
  HTT spacer sequence GTCN PAM
ugguuuuaggccacagacug

SEQ ID NO: 22841 - RNA, 20 nt, Artificial Sequence
  HTT spacer sequence GTCN PAM
guggccuaaaaccaugacag

SEQ ID NO: 22842 - RNA, 20 nt, Artificial Sequence
  HTT spacer sequence GTCN PAM
gaaguacgugcucuuuccac

SEQ ID NO: 22843 - RNA, 20 nt, Artificial Sequence
  HTT spacer sequence GTCN PAM
gcccacgucugaaguacgug

SEQ ID NO: 22844 - RNA, 20 nt, Artificial Sequence
  HTT spacer sequence GTCN PAM
ggguccugucguaucacuuc

SEQ ID NO: 22845 - RNA, 20 nt, Artificial Sequence
  HTT spacer sequence GTCN PAM
ugucguaucacuuccagcag

SEQ ID NO: 22846 - RNA, 20 nt, Artificial Sequence
  HTT spacer sequence GTCN PAM
uaucacuuccagcagcguga

SEQ ID NO: 22847 - RNA, 20 nt, Artificial Sequence
  HTT spacer sequence GTCN PAM
gcuuuccauucccuuucucu

SEQ ID NO: 22848 - RNA, 20 nt, Artificial Sequence
  HTT spacer sequence GTCN PAM
uuaucuuggaauuacgggug

SEQ ID NO: 22849 - RNA, 20 nt, Artificial Sequence
  HTT spacer sequence GTCN PAM
uuauuacuuccaauauuuuc

SEQ ID NO: 22850 - RNA, 20 nt, Artificial Sequence
  HTT spacer sequence GTCN PAM
cugccagugagggucucauc

SEQ ID NO: 22851 - RNA, 20 nt, Artificial Sequence
  HTT spacer sequence GTCN PAM
caucaagcaaagagcuuccu

SEQ ID NO: 22852 - RNA, 20 nt, Artificial Sequence
  HTT spacer sequence GTCN PAM
accuggcauuucuuaggcca

SEQ ID NO: 22853 - RNA, 20 nt, Artificial Sequence
  HTT spacer sequence GTCN PAM
agugcgagccacaggaaaaa

SEQ ID NO: 22854 - RNA, 20 nt, Artificial Sequence
  HTT spacer sequence GTCN PAM
ccucuuagucuucacugugc

SEQ ID NO: 22855 - RNA, 20 nt, Artificial Sequence
  HTT spacer sequence GTCN PAM
ucacugugcauuguuugauu

SEQ ID NO: 22856 - RNA, 20 nt, Artificial Sequence
  HTT spacer sequence GTCN PAM
gccgacaugccgcucagcuc

SEQ ID NO: 22857 - RNA, 20 nt, Artificial Sequence
  HTT spacer sequence GTCN PAM
gcugacaaaagugcuaugaa

SEQ ID NO: 22858 - RNA, 20 nt, Artificial Sequence
  HTT spacer sequence GTCN PAM
uuucuuguuuucugaguuua

SEQ ID NO: 22859 - RNA, 20 nt, Artificial Sequence
  HTT spacer sequence GTCN PAM
cccgccucccauucugucac

SEQ ID NO: 22860 - RNA, 20 nt, Artificial Sequence
  HTT spacer sequence GTCN PAM
cucuucacaccugccagcuu

SEQ ID NO: 22861 - RNA, 20 nt, Artificial Sequence
  HTT spacer sequence GTCN PAM
auuaguuacccguguuucuu

SEQ ID NO: 22862 - RNA, 20 nt, Artificial Sequence
  HTT spacer sequence GTCN PAM
auuucucuggccccugggac

SEQ ID NO: 22863 - RNA, 20 nt, Artificial Sequence
  HTT spacer sequence GTCN PAM
caggggccagagaaauugac

SEQ ID NO: 22864 - RNA, 20 nt, Artificial Sequence
  HTT spacer sequence GTCN PAM
cagugucccaggggccagag

SEQ ID NO: 22865 - RNA, 20 nt, Artificial Sequence
  HTT spacer sequence GTCN PAM
aaaaaaaaaaaaaaaaagag

SEQ ID NO: 22866 - RNA, 20 nt, Artificial Sequence
  HTT spacer sequence GTCN PAM
aggcuggagcgcaauggcac

SEQ ID NO: 22867 - RNA, 20 nt, Artificial Sequence
  HTT spacer sequence GTCN PAM
cugcagccucaaccuuccag

SEQ ID NO: 22868 - RNA, 20 nt, Artificial Sequence
  HTT spacer sequence GTCN PAM
cccugcacaaagcagcuaac

SEQ ID NO: 22869 - RNA, 20 nt, Artificial Sequence
  HTT spacer sequence GTCN PAM
cacucugucacccaggcugg

SEQ ID NO: 22870 - RNA, 20 nt, Artificial Sequence
  HTT spacer sequence GTCN PAM
cacaccaccaugccuggcua

SEQ ID NO: 22871 - RNA, 20 nt, Artificial Sequence
  HTT spacer sequence GTCN PAM
cagcuacucagaaggcugug

SEQ ID NO: 22872 - RNA, 20 nt, Artificial Sequence
  HTT spacer sequence GTCN PAM
gggcugcagugagccauuau

SEQ ID NO: 22873 - RNA, 20 nt, Artificial Sequence
  HTT spacer sequence GTCN PAM
cccaggcuggagugcagugg

SEQ ID NO: 22874 - RNA, 20 nt, Artificial Sequence
  HTT spacer sequence GTCN PAM
cuagguuccuugggagaggc

SEQ ID NO: 22875 - RNA, 20 nt, Artificial Sequence
  HTT spacer sequence GTCN PAM
ugauguauuaaaacaguaac

SEQ ID NO: 22876 - RNA, 20 nt, Artificial Sequence
  HTT spacer sequence GTCN PAM
ccacgcccggcuaauuuuug

SEQ ID NO: 22877 - RNA, 20 nt, Artificial Sequence
  HTT spacer sequence GTCN PAM
cccagguuucaagcgauucu

SEQ ID NO: 22878 - RNA, 20 nt, Artificial Sequence
  HTT spacer sequence GTCN PAM
uuagguuaguuuagccuacg

SEQ ID NO: 22879 - RNA, 20 nt, Artificial Sequence
  HTT spacer sequence GTCN PAM
uggagccgguuucucccagc

SEQ ID NO: 22880 - RNA, 20 nt, Artificial Sequence
  HTT spacer sequence GTCN PAM
cuuacacuauuggaaauaug

SEQ ID NO: 22881 - RNA, 20 nt, Artificial Sequence
  HTT spacer sequence GTCN PAM
gagggcccuggguguuuuuu

SEQ ID NO: 22882 - RNA, 20 nt, Artificial Sequence
  HTT spacer sequence GTCN PAM
cugauauaaaauggugcaaa

SEQ ID NO: 22883 - RNA, 20 nt, Artificial Sequence
  HTT spacer sequence GTCN PAM
ucaagucccugauauaaaau

SEQ ID NO: 22884 - RNA, 20 nt, Artificial Sequence
  HTT spacer sequence GTCN PAM
cacagcaggccccuuucccu

SEQ ID NO: 22885 - RNA, 20 nt, Artificial Sequence
  HTT spacer sequence GTCN PAM
cccuugucaccuuguaagcc

SEQ ID NO: 22886 - RNA, 20 nt, Artificial Sequence
  HTT spacer sequence GTCN PAM
ccuuguaagccuggcccucg

SEQ ID NO: 22887 - RNA, 20 nt, Artificial Sequence
  HTT spacer sequence GTCN PAM
ugcugcucccacacccccug

SEQ ID NO: 22888 - RNA, 20 nt, Artificial Sequence
  HTT spacer sequence GTCN PAM
ucacuucauuguaccuuugc

SEQ ID NO: 22889 - RNA, 20 nt, Artificial Sequence
  HTT spacer sequence GTCN PAM
uucugagagacuccugcuca

SEQ ID NO: 22890 - RNA, 20 nt, Artificial Sequence
  HTT spacer sequence GTCN PAM
cucagaaugacaggaagagg

SEQ ID NO: 22891 - RNA, 20 nt, Artificial Sequence
  HTT spacer sequence GTCN PAM
gcucagauggucacgucaga

SEQ ID NO: 22892 - RNA, 20 nt, Artificial Sequence
  HTT spacer sequence GTCN PAM
cgucagacgaugagcuucuu

SEQ ID NO: 22893 - RNA, 20 nt, Artificial Sequence
  HTT spacer sequence GTCN PAM
gacgaugagcuucuugggag

SEQ ID NO: 22894 - RNA, 20 nt, Artificial Sequence
  HTT spacer sequence GTCN PAM
gacgugaccaucugagcaga

SEQ ID NO: 22895 - RNA, 20 nt, Artificial Sequence
  HTT spacer sequence GTCN PAM
uugaucucauuucuuccuau

SEQ ID NO: 22896 - RNA, 20 nt, Artificial Sequence
  HTT spacer sequence GTCN PAM
aucagaauaggaagaaauga

SEQ ID NO: 22897 - RNA, 20 nt, Artificial Sequence
  HTT spacer sequence GTCN PAM
uuaagagauauuuaucccau

SEQ ID NO: 22898 - RNA, 20 nt, Artificial Sequence
  HTT spacer sequence GTCN PAM
cugguccuuaagagauauuu

SEQ ID NO: 22899 - RNA, 20 nt, Artificial Sequence
  HTT spacer sequence GTCN PAM
gccccacugccaagccuggu

SEQ ID NO: 22900 - RNA, 20 nt, Artificial Sequence
  HTT spacer sequence GTCN PAM
ucuagacacagagguggucg

SEQ ID NO: 22901 - RNA, 20 nt, Artificial Sequence
  HTT spacer sequence GTCN PAM
agaggacucauagccagggc

SEQ ID NO: 22902 - RNA, 20 nt, Artificial Sequence
  HTT spacer sequence GTCN PAM
ccugaguugaggaagccuug

SEQ ID NO: 22903 - RNA, 20 nt, Artificial Sequence
  HTT spacer sequence GTCN PAM
ggugguauuggaccauggaa

SEQ ID NO: 22904 - RNA, 20 nt, Artificial Sequence
  HTT spacer sequence GTCN PAM
aauaccaccagacucuuacc

SEQ ID NO: 22905 - RNA, 20 nt, Artificial Sequence
  HTT spacer sequence GTCN PAM
ccugugaagugugauuuacu

SEQ ID NO: 22906 - RNA, 20 nt, Artificial Sequence
  HTT spacer sequence GTCN PAM
caagaugagcuggauuuucu

SEQ ID NO: 22907 - RNA, 20 nt, Artificial Sequence
  HTT spacer sequence GTCN PAM
gccccauccaccgcuguguc

SEQ ID NO: 22908 - RNA, 20 nt, Artificial Sequence
  HTT spacer sequence GTCN PAM
acgggacucaccaucaguag

SEQ ID NO: 22909 - RNA, 20 nt, Artificial Sequence
  HTT spacer sequence GTCN PAM
cguggacacagcgguggaug

SEQ ID NO: 22910 - RNA, 20 nt, Artificial Sequence
  HTT spacer sequence GTCN PAM
uucauucaacaaaugcuuag

SEQ ID NO: 22911 - RNA, 20 nt, Artificial Sequence
  HTT spacer sequence GTCN PAM
cagugacauucccaccucag

SEQ ID NO: 22912 - RNA, 20 nt, Artificial Sequence
  HTT spacer sequence GTCN PAM
cugggaccaucggucauuca

SEQ ID NO: 22913 - RNA, 20 nt, Artificial Sequence
  HTT spacer sequence GTCN PAM
cagcuacucagggggcugag

SEQ ID NO: 22914 - RNA, 20 nt, Artificial Sequence
  HTT spacer sequence GTCN PAM
uuaaugaacguggcacaauu

SEQ ID NO: 22915 - RNA, 20 nt, Artificial Sequence
  HTT spacer sequence GTCN PAM
ucaaaucuguauaacuaugc

SEQ ID NO: 22916 - RNA, 20 nt, Artificial Sequence
  HTT spacer sequence GTCN PAM
ucacaugugaguuguuugcu

SEQ ID NO: 22917 - RNA, 20 nt, Artificial Sequence
  HTT spacer sequence GTCN PAM
caugugaguuguuugcugag

SEQ ID NO: 22918 - RNA, 20 nt, Artificial Sequence
  HTT spacer sequence GTCN PAM
ugccuguuugccguggcuca

SEQ ID NO: 22919 - RNA, 20 nt, Artificial Sequence
  HTT spacer sequence GTCN PAM
cuacaagaaacaacaacaaa

SEQ ID NO: 22920 - RNA, 20 nt, Artificial Sequence
  HTT spacer sequence GTCN PAM
acccauuagaugugaaaggc

SEQ ID NO: 22921 - RNA, 20 nt, Artificial Sequence
  HTT spacer sequence GTCN PAM
cucuaacaaagucuacccau

SEQ ID NO: 22922 - RNA, 20 nt, Artificial Sequence
  HTT spacer sequence GTCN PAM
acuuucugcauccaacuuuc

SEQ ID NO: 22923 - RNA, 20 nt, Artificial Sequence
  HTT spacer sequence GTCN PAM
guauuucaucuuuuuaaaau

SEQ ID NO: 22924 - RNA, 20 nt, Artificial Sequence
  HTT spacer sequence GTCN PAM
uuccccuguguuuaggcaag

SEQ ID NO: 22925 - RNA, 20 nt, Artificial Sequence
  HTT spacer sequence GTCN PAM
uaauuuucaauuaaugauug

SEQ ID NO: 22926 - RNA, 20 nt, Artificial Sequence
  HTT spacer sequence GTCN PAM
gggucuugcugugucgccca

SEQ ID NO: 22927 - RNA, 20 nt, Artificial Sequence
  HTT spacer sequence GTCN PAM
ugcugugucgcccaggcugg

SEQ ID NO: 22928 - RNA, 20 nt, Artificial Sequence
  HTT spacer sequence GTCN PAM
cccaggcuggagugcagugg

SEQ ID NO: 22929 - RNA, 20 nt, Artificial Sequence
  HTT spacer sequence GTCN PAM
uuugagcccaguaguucaag

SEQ ID NO: 22930 - RNA, 20 nt, Artificial Sequence
  HTT spacer sequence GTCN PAM
cagcuaugcagaaagcugag

SEQ ID NO: 22931 - RNA, 20 nt, Artificial Sequence
  HTT spacer sequence GTCN PAM
ugcuauguugcccaggcugu

SEQ ID NO: 22932 - RNA, 20 nt, Artificial Sequence
  HTT spacer sequence GTCN PAM
uccugccuucccucccaaag

SEQ ID NO: 22933 - RNA, 20 nt, Artificial Sequence
  HTT spacer sequence GTCN PAM
gaacguuuucucccucuugu

SEQ ID NO: 22934 - RNA, 20 nt, Artificial Sequence
  HTT spacer sequence GTCN PAM
acagcaagaaacaagaggga

SEQ ID NO: 22935 - RNA, 20 nt, Artificial Sequence
  HTT spacer sequence GTCN PAM
uguugccccuggugcugucc

SEQ ID NO: 22936 - RNA, 20 nt, Artificial Sequence
  HTT spacer sequence GTCN PAM
ucuugucacauagcaugugu

SEQ ID NO: 22937 - RNA, 20 nt, Artificial Sequence
  HTT spacer sequence GTCN PAM
cauagcaugugucacagagc

SEQ ID NO: 22938 - RNA, 20 nt, Artificial Sequence
  HTT spacer sequence GTCN PAM
cagagcagggugcagauggc

SEQ ID NO: 22939 - RNA, 20 nt, Artificial Sequence
  HTT spacer sequence GTCN PAM
ccaagcagccaucugcaccc

SEQ ID NO: 22940 - RNA, 20 nt, Artificial Sequence
  HTT spacer sequence GTCN PAM
acuauuacagggucuccaag

SEQ ID NO: 22941 - RNA, 20 nt, Artificial Sequence
  HTT spacer sequence GTCN PAM
gcagcaugggugcacacucc

SEQ ID NO: 22942 - RNA, 20 nt, Artificial Sequence
  HTT spacer sequence GTCN PAM
uacccagaaugcaaggaugg

SEQ ID NO: 22943 - RNA, 20 nt, Artificial Sequence
  HTT spacer sequence GTCN PAM
uacagucuaguagagcacac

SEQ ID NO: 22944 - RNA, 20 nt, Artificial Sequence
  HTT spacer sequence GTCN PAM
aguagagcacacauggcaag

SEQ ID NO: 22945 - RNA, 20 nt, Artificial Sequence
  HTT spacer sequence GTCN PAM
guggcuccugccgagaagag

SEQ ID NO: 22946 - RNA, 20 nt, Artificial Sequence
  HTT spacer sequence GTCN PAM
ucuucucggcaggagccacu

SEQ ID NO: 22947 - RNA, 20 nt, Artificial Sequence
  HTT spacer sequence GTCN PAM
aaggcggagauugagggcag

SEQ ID NO: 22948 - RNA, 20 nt, Artificial Sequence
  HTT spacer sequence GTCN PAM
ugggggacuuggaaugcuag

SEQ ID NO: 22949 - RNA, 20 nt, Artificial Sequence
  HTT spacer sequence GTCN PAM
cccacgacugcccucaaucu

SEQ ID NO: 22950 - RNA, 20 nt, Artificial Sequence
  HTT spacer sequence GTCN PAM
ccuuuuaugccucugccaga

SEQ ID NO: 22951 - RNA, 20 nt, Artificial Sequence
  HTT spacer sequence GTCN PAM
uacaugaauuagauaagcau

SEQ ID NO: 22952 - RNA, 20 nt, Artificial Sequence
  HTT spacer sequence GTCN PAM
gauuccuaaaucuugguauc

SEQ ID NO: 22953 - RNA, 20 nt, Artificial Sequence
  HTT spacer sequence GTCN PAM
aagguuguguccguagcucc

SEQ ID NO: 22954 - RNA, 20 nt, Artificial Sequence
  HTT spacer sequence GTCN PAM
guagcuccugacuuagccug

SEQ ID NO: 22955 - RNA, 20 nt, Artificial Sequence
  HTT spacer sequence GTCN PAM
ggagcuacggacacaaccuu

SEQ ID NO: 22956 - RNA, 20 nt, Artificial Sequence
  HTT spacer sequence GTCN PAM
cuuuauguuucuuuauguuu

SEQ ID NO: 22957 - RNA, 20 nt, Artificial Sequence
  HTT spacer sequence GTCN PAM
uuccccagugcuaacuccug

SEQ ID NO: 22958 - RNA, 20 nt, Artificial Sequence
  HTT spacer sequence GTCN PAM
ugcuaaguuagccaggcagg

SEQ ID NO: 22959 - RNA, 20 nt, Artificial Sequence
  HTT spacer sequence GTCN PAM
cuucucuuggggaccacagu

SEQ ID NO: 22960 - RNA, 20 nt, Artificial Sequence
  HTT spacer sequence GTCN PAM
ccaagagaagagacagggaa

SEQ ID NO: 22961 - RNA, 20 nt, Artificial Sequence
  HTT spacer sequence GTCN PAM
ucugaugccgaugaccacag

SEQ ID NO: 22962 - RNA, 20 nt, Artificial Sequence
  HTT spacer sequence GTCN PAM
ucggcaucagaggacugugg

SEQ ID NO: 22963 - RNA, 20 nt, Artificial Sequence
  HTT spacer sequence GTCN PAM
gggucucucuaugcuaccca

SEQ ID NO: 22964 - RNA, 20 nt, Artificial Sequence
  HTT spacer sequence GTCN PAM
cucuaugcuacccaggcugg

SEQ ID NO: 22965 - RNA, 20 nt, Artificial Sequence
  HTT spacer sequence GTCN PAM
cuuaggcccaggaguuucag

SEQ ID NO: 22966 - RNA, 20 nt, Artificial Sequence
  HTT spacer sequence GTCN PAM
aaacugcagugaggcauaau

SEQ ID NO: 22967 - RNA, 20 nt, Artificial Sequence
  HTT spacer sequence GTCN PAM
agaguucgagaccagccugg

SEQ ID NO: 22968 - RNA, 20 nt, Artificial Sequence
  HTT spacer sequence GTCN PAM
cgaacucuugaccucaagug

SEQ ID NO: 22969 - RNA, 20 nt, Artificial Sequence
  HTT spacer sequence GTCN PAM
cuacuaaaaauacaaaaauu

SEQ ID NO: 22970 - RNA, 20 nt, Artificial Sequence
  HTT spacer sequence GTCN PAM
cccaggcuggaguguagugg

SEQ ID NO: 22971 - RNA, 20 nt, Artificial Sequence
  HTT spacer sequence GTCN PAM
cacucugucgcccaggcugg

SEQ ID NO: 22972 - RNA, 20 nt, Artificial Sequence
  HTT spacer sequence GTCN PAM
caaaaaacaaacaaacaaac

SEQ ID NO: 22973 - RNA, 20 nt, Artificial Sequence
  HTT spacer sequence GTCN PAM
uuagcaaaaguucuuugguu

SEQ ID NO: 22974 - RNA, 20 nt, Artificial Sequence
  HTT spacer sequence GTCN PAM
cucagaggccgggcacagug

SEQ ID NO: 22975 - RNA, 20 nt, Artificial Sequence
  HTT spacer sequence GTCN PAM
ggaguucaagaccagccugg

SEQ ID NO: 22976 - RNA, 20 nt, Artificial Sequence
  HTT spacer sequence GTCN PAM
ugaacuccugacuucaggug

SEQ ID NO: 22977 - RNA, 20 nt, Artificial Sequence
  HTT spacer sequence GTCN PAM
cuacuaaaaauacaaaaauu

SEQ ID NO: 22978 - RNA, 20 nt, Artificial Sequence
  HTT spacer sequence GTCN PAM
cagcuacuugaggggcugag

SEQ ID NO: 22979 - RNA, 20 nt, Artificial Sequence
  HTT spacer sequence GTCN PAM
ccuaggcuggagugcaaugg

SEQ ID NO: 22980 - RNA, 20 nt, Artificial Sequence
  HTT spacer sequence GTCN PAM
cacucugucaccuaggcugg

SEQ ID NO: 22981 - RNA, 20 nt, Artificial Sequence
  HTT spacer sequence GTCN PAM
caaaaaaaaaaaaaaaaaaa

SEQ ID NO: 22982 - RNA, 20 nt, Artificial Sequence
  HTT spacer sequence GTCN PAM
cucaguaucauucccuucug

SEQ ID NO: 22983 - RNA, 20 nt, Artificial Sequence
  HTT spacer sequence GTCN PAM
caaaaaaaaaaaaaaaaaaa

SEQ ID NO: 22984 - RNA, 20 nt, Artificial Sequence
  HTT spacer sequence GTCN PAM
ugcucugucgcccaggcugg

SEQ ID NO: 22985 - RNA, 20 nt, Artificial Sequence
  HTT spacer sequence GTCN PAM
cccaggcuggugugcagugg

SEQ ID NO: 22986 - RNA, 20 nt, Artificial Sequence
  HTT spacer sequence GTCN PAM
cagcugcuugggaggcugag

SEQ ID NO: 22987 - RNA, 20 nt, Artificial Sequence
  HTT spacer sequence GTCN PAM
cuacuaaaaaaaauauaaaa

SEQ ID NO: 22988 - RNA, 20 nt, Artificial Sequence
  HTT spacer sequence GTCN PAM
cgaucuccugaccuugugau

SEQ ID NO: 22989 - RNA, 20 nt, Artificial Sequence
  HTT spacer sequence GTCN PAM
ggagaucgagaccauccugg

SEQ ID NO: 22990 - RNA, 20 nt, Artificial Sequence
  HTT spacer sequence GTCN PAM
agauuccaucccugaccauc

SEQ ID NO: 22991 - RNA, 20 nt, Artificial Sequence
  HTT spacer sequence GTCN PAM
gggauggaaucuagacaucu

SEQ ID NO: 22992 - RNA, 20 nt, Artificial Sequence
  HTT spacer sequence GTCN PAM
acuacuuuauuuaagaaaug

SEQ ID NO: 22993 - RNA, 20 nt, Artificial Sequence
  HTT spacer sequence GTCN PAM
uccacguggcuauuucacug

SEQ ID NO: 22994 - RNA, 20 nt, Artificial Sequence
  HTT spacer sequence GTCN PAM
augaguguugcagagccauc

SEQ ID NO: 22995 - RNA, 20 nt, Artificial Sequence
  HTT spacer sequence GTCN PAM
gucugcugugccuccugcag

SEQ ID NO: 22996 - RNA, 20 nt, Artificial Sequence
  HTT spacer sequence GTCN PAM
gcugugccuccugcaggcga

SEQ ID NO: 22997 - RNA, 20 nt, Artificial Sequence
  HTT spacer sequence GTCN PAM
gguucgccugcaggaggcac

SEQ ID NO: 22998 - RNA, 20 nt, Artificial Sequence
  HTT spacer sequence GTCN PAM
ucuccaccggugcuguuucc

SEQ ID NO: 22999 - RNA, 20 nt, Artificial Sequence
  HTT spacer sequence GTCN PAM
uagaagugggugaauucaua

SEQ ID NO: 23000 - RNA, 20 nt, Artificial Sequence
  HTT spacer sequence GTCN PAM
gauauugccagauuccgcuc

SEQ ID NO: 23001 - RNA, 20 nt, Artificial Sequence
  HTT spacer sequence GTCN PAM
gcauucccaccagcagugca

SEQ ID NO: 23002 - RNA, 20 nt, Artificial Sequence
  HTT spacer sequence GTCN PAM
gcuggcgaggcuguggggaa

SEQ ID NO: 23003 - RNA, 20 nt, Artificial Sequence
  HTT spacer sequence GTCN PAM
guuuguuagcugggaauugg

SEQ ID NO: 23004 - RNA, 20 nt, Artificial Sequence
  HTT spacer sequence GTCN PAM
uauuuuucuuauaaaaaugg

SEQ ID NO: 23005 - RNA, 20 nt, Artificial Sequence
  HTT spacer sequence GTCN PAM
caacauguuagcacucuacu

SEQ ID NO: 23006 - RNA, 20 nt, Artificial Sequence
  HTT spacer sequence GTCN PAM
ugaacuccugggcucaagcg

SEQ ID NO: 23007 - RNA, 20 nt, Artificial Sequence
  HTT spacer sequence GTCN PAM
uguugcccaggcuggucuug

SEQ ID NO: 23008 - RNA, 20 nt, Artificial Sequence
  HTT spacer sequence GTCN PAM
cuacaaaagaaaagaaaaga

SEQ ID NO: 23009 - RNA, 20 nt, Artificial Sequence
  HTT spacer sequence GTCN PAM
caguuuccuccccuuguaca

SEQ ID NO: 23010 - RNA, 20 nt, Artificial Sequence
  HTT spacer sequence GTCN PAM
uggcucugccauguacuauc

SEQ ID NO: 23011 - RNA, 20 nt, Artificial Sequence
  HTT spacer sequence GTCN PAM
gaguccuggcucugccaugu

SEQ ID NO: 23012 - RNA, 20 nt, Artificial Sequence
  HTT spacer sequence GTCN PAM
gugcuccucaccccugugcu

SEQ ID NO: 23013 - RNA, 20 nt, Artificial Sequence
  HTT spacer sequence GTCN PAM
gaggccggcuuuccucucua

SEQ ID NO: 23014 - RNA, 20 nt, Artificial Sequence
  HTT spacer sequence GTCN PAM
gcaugaugcuuuagagagga

SEQ ID NO: 23015 - RNA, 20 nt, Artificial Sequence
  HTT spacer sequence GTCN PAM
uuuuaaaacagucugcauga

SEQ ID NO: 23016 - RNA, 20 nt, Artificial Sequence
  HTT spacer sequence GTCN PAM
cauauuuuuaguuuuuagca

SEQ ID NO: 23017 - RNA, 20 nt, Artificial Sequence
  HTT spacer sequence GTCN PAM
gcuuccagggcuggcuaauc

SEQ ID NO: 23018 - RNA, 20 nt, Artificial Sequence
  HTT spacer sequence GTCN PAM
caaaaaaauuauaaagaaaa

SEQ ID NO: 23019 - RNA, 20 nt, Artificial Sequence
  HTT spacer sequence GTCN PAM
aggcugcggugaaccaugau

SEQ ID NO: 23020 - RNA, 20 nt, Artificial Sequence
  HTT spacer sequence GTCN PAM
cagcuacucuggaggcugag

SEQ ID NO: 23021 - RNA, 20 nt, Artificial Sequence
  HTT spacer sequence GTCN PAM
cuauaaaaaaagauuuuuaa

SEQ ID NO: 23022 - RNA, 20 nt, Artificial Sequence
  HTT spacer sequence GTCN PAM
ugucauguuucccaggcugg

SEQ ID NO: 23023 - RNA, 20 nt, Artificial Sequence
  HTT spacer sequence GTCN PAM
uguuucccaggcuggucuca

SEQ ID NO: 23024 - RNA, 20 nt, Artificial Sequence
  HTT spacer sequence GTCN PAM
caaaauguggaacucaagua

SEQ ID NO: 23025 - RNA, 20 nt, Artificial Sequence
  HTT spacer sequence GTCN PAM
gaggauuacuugaguuccac

SEQ ID NO: 23026 - RNA, 20 nt, Artificial Sequence
  HTT spacer sequence GTCN PAM
ggccuaauuuguuaguucca

SEQ ID NO: 23027 - RNA, 20 nt, Artificial Sequence
  HTT spacer sequence GTCN PAM
gggaaauaauaaacaaaauu

SEQ ID NO: 23028 - RNA, 20 nt, Artificial Sequence
  HTT spacer sequence GTCN PAM
cuguguauaguacugguacu

SEQ ID NO: 23029 - RNA, 20 nt, Artificial Sequence
  HTT spacer sequence GTCN PAM
gaguaccaguacuauacaca

SEQ ID NO: 23030 - RNA, 20 nt, Artificial Sequence
  HTT spacer sequence GTCN PAM
uacaacuuccagguacauca

SEQ ID NO: 23031 - RNA, 20 nt, Artificial Sequence
  HTT spacer sequence GTCN PAM
uaucaagugguggccuauga

SEQ ID NO: 23032 - RNA, 20 nt, Artificial Sequence
  HTT spacer sequence GTCN PAM
uuacuucccccgugaccugu

SEQ ID NO: 23033 - RNA, 20 nt, Artificial Sequence
  HTT spacer sequence GTCN PAM
cgggggaaguaaugacaccg

SEQ ID NO: 23034 - RNA, 20 nt, Artificial Sequence
  HTT spacer sequence GTCN PAM
uguguguucaaauauguuau

SEQ ID NO: 23035 - RNA, 20 nt, Artificial Sequence
  HTT spacer sequence GTCN PAM
gaaauccggauguguccugu

SEQ ID NO: 23036 - RNA, 20 nt, Artificial Sequence
  HTT spacer sequence GTCN PAM
uucugggaucucuguggcca

SEQ ID NO: 23037 - RNA, 20 nt, Artificial Sequence
  HTT spacer sequence GTCN PAM
gcuacauggguucgugagag

SEQ ID NO: 23038 - RNA, 20 nt, Artificial Sequence
  HTT spacer sequence GTCN PAM
uuguccuuucuauccgggug

SEQ ID NO: 23039 - RNA, 20 nt, Artificial Sequence
  HTT spacer sequence GTCN PAM
uuucuauccgggugccugag

SEQ ID NO: 23040 - RNA, 20 nt, Artificial Sequence
  HTT spacer sequence GTCN PAM
auucaggguggauuucucug

SEQ ID NO: 23041 - RNA, 20 nt, Artificial Sequence
  HTT spacer sequence GTCN PAM
aaaccgaggccccgguccau

SEQ ID NO: 23042 - RNA, 20 nt, Artificial Sequence
  HTT spacer sequence GTCN PAM
gaguguugaggcugcugggg

SEQ ID NO: 23043 - RNA, 20 nt, Artificial Sequence
  HTT spacer sequence GTCN PAM
ugaggucacucagcgaagug

SEQ ID NO: 23044 - RNA, 20 nt, Artificial Sequence
  HTT spacer sequence GTCN PAM
cucagcgaagugagggcaga

SEQ ID NO: 23045 - RNA, 20 nt, Artificial Sequence
  HTT spacer sequence GTCN PAM
ucccgauucugcccucacuu

SEQ ID NO: 23046 - RNA, 20 nt, Artificial Sequence
  HTT spacer sequence GTCN PAM
ccucacucuaccaguguccu

SEQ ID NO: 23047 - RNA, 20 nt, Artificial Sequence
  HTT spacer sequence GTCN PAM
uccccugugcaccacggccu

SEQ ID NO: 23048 - RNA, 20 nt, Artificial Sequence
  HTT spacer sequence GTCN PAM
ugcaggaagaccccaagguc

SEQ ID NO: 23049 - RNA, 20 nt, Artificial Sequence
  HTT spacer sequence GTCN PAM
uccugcaggacucugcgagg

SEQ ID NO: 23050 - RNA, 20 nt, Artificial Sequence
  HTT spacer sequence GTCN PAM
uguggcuuuccgcucuugcg

SEQ ID NO: 23051 - RNA, 20 nt, Artificial Sequence
  HTT spacer sequence GTCN PAM
ugugggguuuuucacugccc

SEQ ID NO: 23052 - RNA, 20 nt, Artificial Sequence
  HTT spacer sequence GTCN PAM
ugccaucuaucccagggcag

SEQ ID NO: 23053 - RNA, 20 nt, Artificial Sequence
  HTT spacer sequence GTCN PAM
cgucuugccaucuaucccag

SEQ ID NO: 23054 - RNA, 20 nt, Artificial Sequence
  HTT spacer sequence GTCN PAM
ggagggagccccuucaggag

SEQ ID NO: 23055 - RNA, 20 nt, Artificial Sequence
  HTT spacer sequence GTCN PAM
agggaaggcuccaccuccug

SEQ ID NO: 23056 - RNA, 20 nt, Artificial Sequence
  HTT spacer sequence GTCN PAM
cauucacaagggaaauggug

SEQ ID NO: 23057 - RNA, 20 nt, Artificial Sequence
  HTT spacer sequence GTCN PAM
accaguuugaaguguguaau

SEQ ID NO: 23058 - RNA, 20 nt, Artificial Sequence
  HTT spacer sequence GTCN PAM
ugcaaccaucaccaccaucu

SEQ ID NO: 23059 - RNA, 20 nt, Artificial Sequence
  HTT spacer sequence GTCN PAM
caaaaaaaaaaaaaaguugu

SEQ ID NO: 23060 - RNA, 20 nt, Artificial Sequence
  HTT spacer sequence GTCN PAM
cacucagucgcccaggcuag

SEQ ID NO: 23061 - RNA, 20 nt, Artificial Sequence
  HTT spacer sequence GTCN PAM
cccaggcuagaaugcagugg

SEQ ID NO: 23062 - RNA, 20 nt, Artificial Sequence
  HTT spacer sequence GTCN PAM
accucccaggcacaagcgau

SEQ ID NO: 23063 - RNA, 20 nt, Artificial Sequence
  HTT spacer sequence GTCN PAM
cuacuaaaaauacaaaaauu

SEQ ID NO: 23064 - RNA, 20 nt, Artificial Sequence
  HTT spacer sequence GTCN PAM
aggcuggucucaaacuccug

SEQ ID NO: 23065 - RNA, 20 nt, Artificial Sequence
  HTT spacer sequence GTCN PAM
caaacuccugaucucaggug

SEQ ID NO: 23066 - RNA, 20 nt, Artificial Sequence
  HTT spacer sequence GTCN PAM
auguugucacacacguugaa

SEQ ID NO: 23067 - RNA, 20 nt, Artificial Sequence
  HTT spacer sequence GTCN PAM
cacacguugaauguauacug

SEQ ID NO: 23068 - RNA, 20 nt, Artificial Sequence
  HTT spacer sequence GTCN PAM
auaaugaaaaguauacguuu

SEQ ID NO: 23069 - RNA, 20 nt, Artificial Sequence
  HTT spacer sequence GTCN PAM
cgauugguggggacuuggcu

SEQ ID NO: 23070 - RNA, 20 nt, Artificial Sequence
  HTT spacer sequence GTCN PAM
ccaccaaucgggacuaaacg

SEQ ID NO: 23071 - RNA, 20 nt, Artificial Sequence
  HTT spacer sequence GTCN PAM
gaucuaugaaaugauucagg

SEQ ID NO: 23072 - RNA, 20 nt, Artificial Sequence
  HTT spacer sequence GTCN PAM
cugaaucauuucauagauca

SEQ ID NO: 23073 - RNA, 20 nt, Artificial Sequence
  HTT spacer sequence GTCN PAM
aaugggaggaggucgaucaa

SEQ ID NO: 23074 - RNA, 20 nt, Artificial Sequence
  HTT spacer sequence GTCN PAM
aucaaagaaucaagaaugau

SEQ ID NO: 23075 - RNA, 20 nt, Artificial Sequence
  HTT spacer sequence GTCN PAM
ggcucuguagaggcugggaa

SEQ ID NO: 23076 - RNA, 20 nt, Artificial Sequence
  HTT spacer sequence GTCN PAM
gucaucuucagcaaguccug

SEQ ID NO: 23077 - RNA, 20 nt, Artificial Sequence
  HTT spacer sequence GTCN PAM
ucuucagcaaguccugguca

SEQ ID NO: 23078 - RNA, 20 nt, Artificial Sequence
  HTT spacer sequence GTCN PAM
uggucacccaccucccaggc

SEQ ID NO: 23079 - RNA, 20 nt, Artificial Sequence
  HTT spacer sequence GTCN PAM
cccaccucccaggcccugcc

SEQ ID NO: 23080 - RNA, 20 nt, Artificial Sequence
  HTT spacer sequence GTCN PAM
ucccuacugggcugcagggg

SEQ ID NO: 23081 - RNA, 20 nt, Artificial Sequence
  HTT spacer sequence GTCN PAM
accugugucuuggcccagca

SEQ ID NO: 23082 - RNA, 20 nt, Artificial Sequence
  HTT spacer sequence GTCN PAM
uggcccagcagggaggacac

SEQ ID NO: 23083 - RNA, 20 nt, Artificial Sequence
  HTT spacer sequence GTCN PAM
ucccugcugggccaagacac

SEQ ID NO: 23084 - RNA, 20 nt, Artificial Sequence
  HTT spacer sequence GTCN PAM
accugucuccuggcccagca

SEQ ID NO: 23085 - RNA, 20 nt, Artificial Sequence
  HTT spacer sequence GTCN PAM
ccuggcccagcagggaggac

SEQ ID NO: 23086 - RNA, 20 nt, Artificial Sequence
  HTT spacer sequence GTCN PAM
ucccugcugggccaggagac

SEQ ID NO: 23087 - RNA, 20 nt, Artificial Sequence
  HTT spacer sequence GTCN PAM
accugccuccuggcccagca

SEQ ID NO: 23088 - RNA, 20 nt, Artificial Sequence
  HTT spacer sequence GTCN PAM
ucccugcugggccaggaggc

SEQ ID NO: 23089 - RNA, 20 nt, Artificial Sequence
  HTT spacer sequence GTCN PAM
accugucucuuggcccagca

SEQ ID NO: 23090 - RNA, 20 nt, Artificial Sequence
  HTT spacer sequence GTCN PAM
cuuggcccagcagggaggac

SEQ ID NO: 23091 - RNA, 20 nt, Artificial Sequence
  HTT spacer sequence GTCN PAM
ucccugcugggccaagagac

SEQ ID NO: 23092 - RNA, 20 nt, Artificial Sequence
  HTT spacer sequence GTCN PAM
accugccuccuuccccaugc

SEQ ID NO: 23093 - RNA, 20 nt, Artificial Sequence
  HTT spacer sequence GTCN PAM
gaugaaaucccaguggcagg

SEQ ID NO: 23094 - RNA, 20 nt, Artificial Sequence
  HTT spacer sequence GTCN PAM
ggaaacuuuucucacuggcu

SEQ ID NO: 23095 - RNA, 20 nt, Artificial Sequence
  HTT spacer sequence GTCN PAM
uuuccagaucaugucuggaa

SEQ ID NO: 23096 - RNA, 20 nt, Artificial Sequence
  HTT spacer sequence GTCN PAM
augaaacaaggcuuggcuau

SEQ ID NO: 23097 - RNA, 20 nt, Artificial Sequence
  HTT spacer sequence GTCN PAM
aacuucauauaaaauugguc

SEQ ID NO: 23098 - RNA, 20 nt, Artificial Sequence
  HTT spacer sequence GTCN PAM
cagagacacucugaccugag

SEQ ID NO: 23099 - RNA, 20 nt, Artificial Sequence
  HTT spacer sequence GTCN PAM
cugggacuacaaucccuggc

SEQ ID NO: 23100 - RNA, 20 nt, Artificial Sequence
  HTT spacer sequence GTCN PAM
gagugucucugggacuacaa

SEQ ID NO: 23101 - RNA, 20 nt, Artificial Sequence
  HTT spacer sequence GTCN PAM
agcaccaggcccagagccag

SEQ ID NO: 23102 - RNA, 20 nt, Artificial Sequence
  HTT spacer sequence GTCN PAM
guccagcaccaggcccagag

SEQ ID NO: 23103 - RNA, 20 nt, Artificial Sequence
  HTT spacer sequence GTCN PAM
gccucagaggcccuuagcac

SEQ ID NO: 23104 - RNA, 20 nt, Artificial Sequence
  HTT spacer sequence GTCN PAM
cagcaaggagaugagcccca

SEQ ID NO: 23105 - RNA, 20 nt, Artificial Sequence
  HTT spacer sequence GTCN PAM
ccaccgcuuggggcucaucu

SEQ ID NO: 23106 - RNA, 20 nt, Artificial Sequence
  HTT spacer sequence GTCN PAM
cuggucccagaaugagccag

SEQ ID NO: 23107 - RNA, 20 nt, Artificial Sequence
  HTT spacer sequence GTCN PAM
cagaaugagccaguggcugu

SEQ ID NO: 23108 - RNA, 20 nt, Artificial Sequence
  HTT spacer sequence GTCN PAM
ggguccaucugccucuggga

SEQ ID NO: 23109 - RNA, 20 nt, Artificial Sequence
  HTT spacer sequence GTCN PAM
aucugccucugggacuggac

SEQ ID NO: 23110 - RNA, 20 nt, Artificial Sequence
  HTT spacer sequence GTCN PAM
cagaggcagauggacccuga

SEQ ID NO: 23111 - RNA, 20 nt, Artificial Sequence
  HTT spacer sequence GTCN PAM
agucccagaggcagauggac

SEQ ID NO: 23112 - RNA, 20 nt, Artificial Sequence
  HTT spacer sequence GTCN PAM
gggcagugaggggugguaac

SEQ ID NO: 23113 - RNA, 20 nt, Artificial Sequence
  HTT spacer sequence GTCN PAM
uaggcauugggggaaacagc

SEQ ID NO: 23114 - RNA, 20 nt, Artificial Sequence
  HTT spacer sequence GTCN PAM
ccgcccugccagcgagaacu

SEQ ID NO: 23115 - RNA, 20 nt, Artificial Sequence
  HTT spacer sequence GTCN PAM
guucucgcuggcagggcggg

SEQ ID NO: 23116 - RNA, 20 nt, Artificial Sequence
  HTT spacer sequence GTCN PAM
augcauuuguucuguuuccu

SEQ ID NO: 23117 - RNA, 20 nt, Artificial Sequence
  HTT spacer sequence GTCN PAM
uccccacagcccacacgucu

SEQ ID NO: 23118 - RNA, 20 nt, Artificial Sequence
  HTT spacer sequence GTCN PAM
uccagagugcggguccuccc

SEQ ID NO: 23119 - RNA, 20 nt, Artificial Sequence
  HTT spacer sequence GTCN PAM
gccugcugggcagagcagac

SEQ ID NO: 23120 - RNA, 20 nt, Artificial Sequence
  HTT spacer sequence GTCN PAM
gcucugcccagcaggccgac

SEQ ID NO: 23121 - RNA, 20 nt, Artificial Sequence
  HTT spacer sequence GTCN PAM
gcaauagcaaggccacagug

SEQ ID NO: 23122 - RNA, 20 nt, Artificial Sequence
  HTT spacer sequence GTCN PAM
cccucuaacccccuccugcu

SEQ ID NO: 23123 - RNA, 20 nt, Artificial Sequence
  HTT spacer sequence GTCN PAM
cgucccccucuaacccccuc

SEQ ID NO: 23124 - RNA, 20 nt, Artificial Sequence
  HTT spacer sequence GTCN PAM
cuuguuauugucaucauugu

SEQ ID NO: 23125 - RNA, 20 nt, Artificial Sequence
  HTT spacer sequence GTCN PAM
ucauugucaagccuugagug

SEQ ID NO: 23126 - RNA, 20 nt, Artificial Sequence
  HTT spacer sequence GTCN PAM
agccuugaguguugcuuccu

SEQ ID NO: 23127 - RNA, 20 nt, Artificial Sequence
  HTT spacer sequence GTCN PAM
caucacaucacucuucacag

SEQ ID NO: 23128 - RNA, 20 nt, Artificial Sequence
  HTT spacer sequence GTCN PAM
auucauucucucccaguggc

SEQ ID NO: 23129 - RNA, 20 nt, Artificial Sequence
  HTT spacer sequence GTCN PAM
ccuuuacucucaccugaauc

SEQ ID NO: 23130 - RNA, 20 nt, Artificial Sequence
  HTT spacer sequence GTCN PAM
gcgucaccuuuacucucacc

SEQ ID NO: 23131 - RNA, 20 nt, Artificial Sequence
  HTT spacer sequence GTCN PAM
ucugccaucacuucucacac

SEQ ID NO: 23132 - RNA, 20 nt, Artificial Sequence
  HTT spacer sequence GTCN PAM
gauucaggauggauccugaa

SEQ ID NO: 23133 - RNA, 20 nt, Artificial Sequence
  HTT spacer sequence GTCN PAM
ucuccaccaccugccuucag

SEQ ID NO: 23134 - RNA, 20 nt, Artificial Sequence
  HTT spacer sequence GTCN PAM
gccugaagucuucuccacca

SEQ ID NO: 23135 - RNA, 20 nt, Artificial Sequence
  HTT spacer sequence GTCN PAM
uugcaguggggaggacagca

SEQ ID NO: 23136 - RNA, 20 nt, Artificial Sequence
  HTT spacer sequence GTCN PAM
uccccacugcaaggacuugg

SEQ ID NO: 23137 - RNA, 20 nt, Artificial Sequence
  HTT spacer sequence GTCN PAM
cuggaggaacugcccacaca

SEQ ID NO: 23138 - RNA, 20 nt, Artificial Sequence
  HTT spacer sequence GTCN PAM
guggccagugcagcacagcu

SEQ ID NO: 23139 - RNA, 20 nt, Artificial Sequence
  HTT spacer sequence GTCN PAM
ccccagcugugcugcacugg

SEQ ID NO: 23140 - RNA, 20 nt, Artificial Sequence
  HTT spacer sequence GTCN PAM
cuuauggagcuucuuuuucu

SEQ ID NO: 23141 - RNA, 20 nt, Artificial Sequence
  HTT spacer sequence GTCN PAM
gccccuaguggggagcaaag

SEQ ID NO: 23142 - RNA, 20 nt, Artificial Sequence
  HTT spacer sequence GTCN PAM
gcaugggcucuugaugcugu

SEQ ID NO: 23143 - RNA, 20 nt, Artificial Sequence
  HTT spacer sequence GTCN PAM
agguguggcagaagcccagc

SEQ ID NO: 23144 - RNA, 20 nt, Artificial Sequence
  HTT spacer sequence GTCN PAM
agcagcuagagagaggccgg

SEQ ID NO: 23145 - RNA, 20 nt, Artificial Sequence
  HTT spacer sequence GTCN PAM
cucccuggcaugcagcccag

SEQ ID NO: 23146 - RNA, 20 nt, Artificial Sequence
  HTT spacer sequence GTCN PAM
ucuagucacucccuggcaug

SEQ ID NO: 23147 - RNA, 20 nt, Artificial Sequence
  HTT spacer sequence GTCN PAM
guccucuagucacucccugg

SEQ ID NO: 23148 - RNA, 20 nt, Artificial Sequence
  HTT spacer sequence GTCN PAM
agcccauggucuguccucua

SEQ ID NO: 23149 - RNA, 20 nt, Artificial Sequence
  HTT spacer sequence GTCN PAM
acuggagccagcgucgagcc

SEQ ID NO: 23150 - RNA, 20 nt, Artificial Sequence
  HTT spacer sequence GTCN PAM
auuuccucguccacuggagc

SEQ ID NO: 23151 - RNA, 20 nt, Artificial Sequence
  HTT spacer sequence GTCN PAM
aaguugggaguccauacacc

SEQ ID NO: 23152 - RNA, 20 nt, Artificial Sequence
  HTT spacer sequence GTCN PAM
auacaccuccaggccagagu

SEQ ID NO: 23153 - RNA, 20 nt, Artificial Sequence
  HTT spacer sequence GTCN PAM
cucucaucuuucuaacucug

SEQ ID NO: 23154 - RNA, 20 nt, Artificial Sequence
  HTT spacer sequence GTCN PAM
gcuccacuccaagcagcuuc

SEQ ID NO: 23155 - RNA, 20 nt, Artificial Sequence
  HTT spacer sequence GTCN PAM
ggggugugaccagggagaga

SEQ ID NO: 23156 - RNA, 20 nt, Artificial Sequence
  HTT spacer sequence GTCN PAM
caccccagacucuuggccag

SEQ ID NO: 23157 - RNA, 20 nt, Artificial Sequence
  HTT spacer sequence GTCN PAM
cuggggggauggaggaugaa

SEQ ID NO: 23158 - RNA, 20 nt, Artificial Sequence
  HTT spacer sequence GTCN PAM
cuggagaagagaaggccaca

SEQ ID NO: 23159 - RNA, 20 nt, Artificial Sequence
  HTT spacer sequence GTCN PAM
uguggccuucucuucuccag

SEQ ID NO: 23160 - RNA, 20 nt, Artificial Sequence
  HTT spacer sequence GTCN PAM
guuacccaggcacagcugcu

SEQ ID NO: 23161 - RNA, 20 nt, Artificial Sequence
  HTT spacer sequence GTCN PAM
uuuucauguguuuccauaua

SEQ ID NO: 23162 - RNA, 20 nt, Artificial Sequence
  HTT spacer sequence GTCN PAM
uggagccaggggucagccug

SEQ ID NO: 23163 - RNA, 20 nt, Artificial Sequence
  HTT spacer sequence GTCN PAM
gccuggaguucucccggcua

SEQ ID NO: 23164 - RNA, 20 nt, Artificial Sequence
  HTT spacer sequence GTCN PAM
gcucuaagcagagugaggua

SEQ ID NO: 23165 - RNA, 20 nt, Artificial Sequence
  HTT spacer sequence GTCN PAM
uccucccacaggacacugac

SEQ ID NO: 23166 - RNA, 20 nt, Artificial Sequence
  HTT spacer sequence GTCN PAM
ugugggaggaagacuccauu

SEQ ID NO: 23167 - RNA, 20 nt, Artificial Sequence
  HTT spacer sequence GTCN PAM
guguccugugggaggaagac

SEQ ID NO: 23168 - RNA, 20 nt, Artificial Sequence
  HTT spacer sequence GTCN PAM
gccccuaagagcucacaguu

SEQ ID NO: 23169 - RNA, 20 nt, Artificial Sequence
  HTT spacer sequence GTCN PAM
uuucuguuuguuuuaggccu

SEQ ID NO: 23170 - RNA, 20 nt, Artificial Sequence
  HTT spacer sequence GTCN PAM
aggcagguggaucaugaggu

SEQ ID NO: 23171 - RNA, 20 nt, Artificial Sequence
  HTT spacer sequence GTCN PAM
ggaguuugagaccagccugg

SEQ ID NO: 23172 - RNA, 20 nt, Artificial Sequence
  HTT spacer sequence GTCN PAM
caaacuccugaccucaugau

SEQ ID NO: 23173 - RNA, 20 nt, Artificial Sequence
  HTT spacer sequence GTCN PAM
ccaggcuggagugcaguggc

SEQ ID NO: 23174 - RNA, 20 nt, Artificial Sequence
  HTT spacer sequence GTCN PAM
ugcucugucgccaggcugga

SEQ ID NO: 23175 - RNA, 20 nt, Artificial Sequence
  HTT spacer sequence GTCN PAM
caaaaaagaaaaaagaaaag

SEQ ID NO: 23176 - RNA, 20 nt, Artificial Sequence
  HTT spacer sequence GTCN PAM
uaaguggauagaaacaaagg

SEQ ID NO: 23177 - RNA, 20 nt, Artificial Sequence
  HTT spacer sequence GTCN PAM
gagugagggcucugugugag

SEQ ID NO: 23178 - RNA, 20 nt, Artificial Sequence
  HTT spacer sequence GTCN PAM
cagcucccauuacaggauca

SEQ ID NO: 23179 - RNA, 20 nt, Artificial Sequence
  HTT spacer sequence GTCN PAM
uuaacccauagaacccauuc

SEQ ID NO: 23180 - RNA, 20 nt, Artificial Sequence
  HTT spacer sequence GTCN PAM
cacagcaacugcuggcagcu

SEQ ID NO: 23181 - RNA, 20 nt, Artificial Sequence
  HTT spacer sequence GTCN PAM
agcugccagcaguugcugug

SEQ ID NO: 23182 - RNA, 20 nt, Artificial Sequence
  HTT spacer sequence GTCN PAM
aaaagcuggccucaggucca

SEQ ID NO: 23183 - RNA, 20 nt, Artificial Sequence
  HTT spacer sequence GTCN PAM
ggccaucugucuuagucccu

SEQ ID NO: 23184 - RNA, 20 nt, Artificial Sequence
  HTT spacer sequence GTCN PAM
uagucccuuugggcugcuau

SEQ ID NO: 23185 - RNA, 20 nt, Artificial Sequence
  HTT spacer sequence GTCN PAM
cuuugggcugcuaugacaga

SEQ ID NO: 23186 - RNA, 20 nt, Artificial Sequence
  HTT spacer sequence GTCN PAM
uagcagcccaaagggacuaa

SEQ ID NO: 23187 - RNA, 20 nt, Artificial Sequence
  HTT spacer sequence GTCN PAM
aagggauucugucauagcag

SEQ ID NO: 23188 - RNA, 20 nt, Artificial Sequence
  HTT spacer sequence GTCN PAM
ggaggcuggaaguccuagau

SEQ ID NO: 23189 - RNA, 20 nt, Artificial Sequence
  HTT spacer sequence GTCN PAM
uagaucaagaugccugcaga

SEQ ID NO: 23190 - RNA, 20 nt, Artificial Sequence
  HTT spacer sequence GTCN PAM
cuagcuccuuggcucaagug

SEQ ID NO: 23191 - RNA, 20 nt, Artificial Sequence
  HTT spacer sequence GTCN PAM
auauuuuaaaagaaagaaag

SEQ ID NO: 23192 - RNA, 20 nt, Artificial Sequence
  HTT spacer sequence GTCN PAM
ucugcccugugagggugcag

SEQ ID NO: 23193 - RNA, 20 nt, Artificial Sequence
  HTT spacer sequence GTCN PAM
ugaaggcucugcccucguga

SEQ ID NO: 23194 - RNA, 20 nt, Artificial Sequence
  HTT spacer sequence GTCN PAM
caccucucaauacuauugca

SEQ ID NO: 23195 - RNA, 20 nt, Artificial Sequence
  HTT spacer sequence GTCN PAM
cugagaugcagaaaugguau

SEQ ID NO: 23196 - RNA, 20 nt, Artificial Sequence
  HTT spacer sequence GTCN PAM
caaagaaacaacaacaaaua

SEQ ID NO: 23197 - RNA, 20 nt, Artificial Sequence
  HTT spacer sequence GTCN PAM
caagaaacagaucuggccca

SEQ ID NO: 23198 - RNA, 20 nt, Artificial Sequence
  HTT spacer sequence GTCN PAM
caccacuguacuccaaccug

SEQ ID NO: 23199 - RNA, 20 nt, Artificial Sequence
  HTT spacer sequence GTCN PAM
cagcuacucaggagccugag

SEQ ID NO: 23200 - RNA, 20 nt, Artificial Sequence
  HTT spacer sequence GTCN PAM
ggcuaauuuuuguauuuuua

SEQ ID NO: 23201 - RNA, 20 nt, Artificial Sequence
  HTT spacer sequence GTCN PAM
cuacuaaaaauacaaaaauu

SEQ ID NO: 23202 - RNA, 20 nt, Artificial Sequence
  HTT spacer sequence GTCN PAM
ugaucuccugaccucgugau

SEQ ID NO: 23203 - RNA, 20 nt, Artificial Sequence
  HTT spacer sequence GTCN PAM
ggagaucaagaccauccugg

SEQ ID NO: 23204 - RNA, 20 nt, Artificial Sequence
  HTT spacer sequence GTCN PAM
ucacauccguuuuaaauuaa

SEQ ID NO: 23205 - RNA, 20 nt, Artificial Sequence
  HTT spacer sequence GTCN PAM
cacagccuuagcuucaggaa

SEQ ID NO: 23206 - RNA, 20 nt, Artificial Sequence
  HTT spacer sequence GTCN PAM
agcaggacagccuggcaaua

SEQ ID NO: 23207 - RNA, 20 nt, Artificial Sequence
  HTT spacer sequence GTCN PAM
ugcuagacucaaagcuuccu

SEQ ID NO: 23208 - RNA, 20 nt, Artificial Sequence
  HTT spacer sequence GTCN PAM
aaaugacucauucucagcaa

SEQ ID NO: 23209 - RNA, 20 nt, Artificial Sequence
  HTT spacer sequence GTCN PAM
uuuggacgcgccauuauugc

SEQ ID NO: 23210 - RNA, 20 nt, Artificial Sequence
  HTT spacer sequence GTCN PAM
ucgaggagagguggaggauc

SEQ ID NO: 23211 - RNA, 20 nt, Artificial Sequence
  HTT spacer sequence GTCN PAM
gcaagccgaagagcuuugua

SEQ ID NO: 23212 - RNA, 20 nt, Artificial Sequence
  HTT spacer sequence GTCN PAM
acaaagcucuucggcuugcu

SEQ ID NO: 23213 - RNA, 20 nt, Artificial Sequence
  HTT spacer sequence GTCN PAM
gcgcuucuaucucccaccgc

SEQ ID NO: 23214 - RNA, 20 nt, Artificial Sequence
  HTT spacer sequence GTCN PAM
uugggacuuugaguuggcca

SEQ ID NO: 23215 - RNA, 20 nt, Artificial Sequence
  HTT spacer sequence GTCN PAM
caaagaccagaaagcauucu

SEQ ID NO: 23216 - RNA, 20 nt, Artificial Sequence
  HTT spacer sequence GTCN PAM
agacuuugcaggucuauuac

SEQ ID NO: 23217 - RNA, 20 nt, Artificial Sequence
  HTT spacer sequence GTCN PAM
agacgcuguuuaccaucugg

SEQ ID NO: 23218 - RNA, 20 nt, Artificial Sequence
  HTT spacer sequence GTCN PAM
auuacagcgauucaacucug

SEQ ID NO: 23219 - RNA, 20 nt, Artificial Sequence
  HTT spacer sequence GTCN PAM
auaaagccuuguuuccaaaa

SEQ ID NO: 23220 - RNA, 20 nt, Artificial Sequence
  HTT spacer sequence GTCN PAM
agccaccacaggcaccagcu

SEQ ID NO: 23221 - RNA, 20 nt, Artificial Sequence
  HTT spacer sequence GTCN PAM
aggucacguuucaggggucc

SEQ ID NO: 23222 - RNA, 20 nt, Artificial Sequence
  HTT spacer sequence GTCN PAM
cguuucagggguccaggucu

SEQ ID NO: 23223 - RNA, 20 nt, Artificial Sequence
  HTT spacer sequence GTCN PAM
aggucuuucauguguugcuu

SEQ ID NO: 23224 - RNA, 20 nt, Artificial Sequence
  HTT spacer sequence GTCN PAM
uucauguguugcuuuugagc

SEQ ID NO: 23225 - RNA, 20 nt, Artificial Sequence
  HTT spacer sequence GTCN PAM
uuagugguauuucugaaauu

SEQ ID NO: 23226 - RNA, 20 nt, Artificial Sequence
  HTT spacer sequence GTCN PAM
auuucagaaauaccacuaag

SEQ ID NO: 23227 - RNA, 20 nt, Artificial Sequence
  HTT spacer sequence GTCN PAM
gcuauguuauuccuuaaguu

SEQ ID NO: 23228 - RNA, 20 nt, Artificial Sequence
  HTT spacer sequence GTCN PAM
uauaauuuaaugaguaaagu

SEQ ID NO: 23229 - RNA, 20 nt, Artificial Sequence
  HTT spacer sequence GTCN PAM
gaguuccugaggucugcuug

SEQ ID NO: 23230 - RNA, 20 nt, Artificial Sequence
  HTT spacer sequence GTCN PAM
gcuugaugcuuggaaauuau

SEQ ID NO: 23231 - RNA, 20 nt, Artificial Sequence
  HTT spacer sequence GTCN PAM
ugagccaccgcgcccagcug

SEQ ID NO: 23232 - RNA, 20 nt, Artificial Sequence
  HTT spacer sequence GTCN PAM
aggcggguggaucacgaggu

SEQ ID NO: 23233 - RNA, 20 nt, Artificial Sequence
  HTT spacer sequence GTCN PAM
ggagauggagaccacgguga

SEQ ID NO: 23234 - RNA, 20 nt, Artificial Sequence
  HTT spacer sequence GTCN PAM
ccaucuccugaccucgugau

SEQ ID NO: 23235 - RNA, 20 nt, Artificial Sequence
  HTT spacer sequence GTCN PAM
ccacuaaaaauacaaaaaau

SEQ ID NO: 23236 - RNA, 20 nt, Artificial Sequence
  HTT spacer sequence GTCN PAM
cagcuacucgggaggcugag

SEQ ID NO: 23237 - RNA, 20 nt, Artificial Sequence
  HTT spacer sequence GTCN PAM
cccaggcuggagugcagugg

SEQ ID NO: 23238 - RNA, 20 nt, Artificial Sequence
  HTT spacer sequence GTCN PAM
cguucugucacccaggcugg

SEQ ID NO: 23239 - RNA, 20 nt, Artificial Sequence
  HTT spacer sequence GTCN PAM
uuugguuauuauuaugcagg

SEQ ID NO: 23240 - RNA, 20 nt, Artificial Sequence
  HTT spacer sequence GTCN PAM
uugaacacggggugcugcuu

SEQ ID NO: 23241 - RNA, 20 nt, Artificial Sequence
  HTT spacer sequence GTCN PAM
ugauguaagugcauugccag

SEQ ID NO: 23242 - RNA, 20 nt, Artificial Sequence
  HTT spacer sequence GTCN PAM
uggcaaugcacuuacaucag

SEQ ID NO: 23243 - RNA, 20 nt, Artificial Sequence
  HTT spacer sequence GTCN PAM
cacuguguugcccaggcugg

SEQ ID NO: 23244 - RNA, 20 nt, Artificial Sequence
  HTT spacer sequence GTCN PAM
ugcacuccuggccucaagug

SEQ ID NO: 23245 - RNA, 20 nt, Artificial Sequence
  HTT spacer sequence GTCN PAM
uccaccuuggccucccacag

SEQ ID NO: 23246 - RNA, 20 nt, Artificial Sequence
  HTT spacer sequence GTCN PAM
uaccugguucuucuucccuc

SEQ ID NO: 23247 - RNA, 20 nt, Artificial Sequence
  HTT spacer sequence GTCN PAM
ccccagugugcuuuggccac

SEQ ID NO: 23248 - RNA, 20 nt, Artificial Sequence
  HTT spacer sequence GTCN PAM
gugaggggcccagugagugg

SEQ ID NO: 23249 - RNA, 20 nt, Artificial Sequence
  HTT spacer sequence GTCN PAM
cugucagccucacugcuggg

SEQ ID NO: 23250 - RNA, 20 nt, Artificial Sequence
  HTT spacer sequence GTCN PAM
gccucacugcugggggagcc

SEQ ID NO: 23251 - RNA, 20 nt, Artificial Sequence
  HTT spacer sequence GTCN PAM
cagcuaccuggggggcuccc

SEQ ID NO: 23252 - RNA, 20 nt, Artificial Sequence
  HTT spacer sequence GTCN PAM
cuagaaaagaagugaaaaug

SEQ ID NO: 23253 - RNA, 20 nt, Artificial Sequence
  HTT spacer sequence GTCN PAM
cccuauguugcccaggcuac

SEQ ID NO: 23254 - RNA, 20 nt, Artificial Sequence
  HTT spacer sequence GTCN PAM
aggcaggaggaucacuuggg

SEQ ID NO: 23255 - RNA, 20 nt, Artificial Sequence
  HTT spacer sequence GTCN PAM
ccuuucuggucucagggcug

SEQ ID NO: 23256 - RNA, 20 nt, Artificial Sequence
  HTT spacer sequence GTCN PAM
cagggcuggcuuucucucuc

SEQ ID NO: 23257 - RNA, 20 nt, Artificial Sequence
  HTT spacer sequence GTCN PAM
ggaacgcguguccccacucu

SEQ ID NO: 23258 - RNA, 20 nt, Artificial Sequence
  HTT spacer sequence GTCN PAM
ccacucugcuucucaugagg

SEQ ID NO: 23259 - RNA, 20 nt, Artificial Sequence
  HTT spacer sequence GTCN PAM
ugggacuguggccuggcccc

SEQ ID NO: 23260 - RNA, 20 nt, Artificial Sequence
  HTT spacer sequence GTCN PAM
caggaccucaugagaagcag

SEQ ID NO: 23261 - RNA, 20 nt, Artificial Sequence
  HTT spacer sequence GTCN PAM
ucaguacggggccaggccac

SEQ ID NO: 23262 - RNA, 20 nt, Artificial Sequence
  HTT spacer sequence GTCN PAM
cugugccuccuugugagugu

SEQ ID NO: 23263 - RNA, 20 nt, Artificial Sequence
  HTT spacer sequence GTCN PAM
caacagcacacucacaagga

SEQ ID NO: 23264 - RNA, 20 nt, Artificial Sequence
  HTT spacer sequence GTCN PAM
agaggaaggugucccaacag

SEQ ID NO: 23265 - RNA, 20 nt, Artificial Sequence
  HTT spacer sequence GTCN PAM
ccgaggggcggggccugccg

SEQ ID NO: 23266 - RNA, 20 nt, Artificial Sequence
  HTT spacer sequence GTCN PAM
acuuccgccuccccaccuug

SEQ ID NO: 23267 - RNA, 20 nt, Artificial Sequence
  HTT spacer sequence GTCN PAM
gcacagcuguuagaguagcu

SEQ ID NO: 23268 - RNA, 20 nt, Artificial Sequence
  HTT spacer sequence GTCN PAM
ugggugaaaaguuucucagg

SEQ ID NO: 23269 - RNA, 20 nt, Artificial Sequence
  HTT spacer sequence GTCN PAM
ugagaaacuuuucacccagg

SEQ ID NO: 23270 - RNA, 20 nt, Artificial Sequence
  HTT spacer sequence GTCN PAM
cacagcugccgacuuccgug

SEQ ID NO: 23271 - RNA, 20 nt, Artificial Sequence
  HTT spacer sequence GTCN PAM
gcagcugugggacccucauc

SEQ ID NO: 23272 - RNA, 20 nt, Artificial Sequence
  HTT spacer sequence GTCN PAM
ccaccugccgccaguacagu

SEQ ID NO: 23273 - RNA, 20 nt, Artificial Sequence
  HTT spacer sequence GTCN PAM
gggucuccaccugccgccag

SEQ ID NO: 23274 - RNA, 20 nt, Artificial Sequence
  HTT spacer sequence GTCN PAM
ggcaggcaggagggagugcc

SEQ ID NO: 23275 - RNA, 20 nt, Artificial Sequence
  HTT spacer sequence GTCN PAM
ucagaggcagagggucaggc

SEQ ID NO: 23276 - RNA, 20 nt, Artificial Sequence
  HTT spacer sequence GTCN PAM
gcagcuccuaucccggcacu

SEQ ID NO: 23277 - RNA, 20 nt, Artificial Sequence
  HTT spacer sequence GTCN PAM
cagaggagggaccugcugau

SEQ ID NO: 23278 - RNA, 20 nt, Artificial Sequence
  HTT spacer sequence GTCN PAM
cuccucugggacaggaaccc

SEQ ID NO: 23279 - RNA, 20 nt, Artificial Sequence
  HTT spacer sequence GTCN PAM
cuugcagccuuggagaccac

SEQ ID NO: 23280 - RNA, 20 nt, Artificial Sequence
  HTT spacer sequence GTCN PAM
ccaaggcugcaagggaccuc

SEQ ID NO: 23281 - RNA, 20 nt, Artificial Sequence
  HTT spacer sequence GTCN PAM
acugaguggucuccaaggcu

SEQ ID NO: 23282 - RNA, 20 nt, Artificial Sequence
  HTT spacer sequence GTCN PAM
cuaagggaucccaccgcugg

SEQ ID NO: 23283 - RNA, 20 nt, Artificial Sequence
  HTT spacer sequence GTCN PAM
cuguucacacuucuccgguu

SEQ ID NO: 23284 - RNA, 20 nt, Artificial Sequence
  HTT spacer sequence GTCN PAM
acccugcccugcaucccuga

SEQ ID NO: 23285 - RNA, 20 nt, Artificial Sequence
  HTT spacer sequence GTCN PAM
gggaugcagggcagggugga

SEQ ID NO: 23286 - RNA, 20 nt, Artificial Sequence
  HTT spacer sequence GTCN PAM
cuugcaugcccuggcucucu

SEQ ID NO: 23287 - RNA, 20 nt, Artificial Sequence
  HTT spacer sequence GTCN PAM
gugccaggucccuugcaugc

SEQ ID NO: 23288 - RNA, 20 nt, Artificial Sequence
  HTT spacer sequence GTCN PAM
ccaauuuugugguacugucu

SEQ ID NO: 23289 - RNA, 20 nt, Artificial Sequence
  HTT spacer sequence GTCN PAM
ucugaagaggugguucgcca

SEQ ID NO: 23290 - RNA, 20 nt, Artificial Sequence
  HTT spacer sequence GTCN PAM
ccauucuuuugccaggcccc

SEQ ID NO: 23291 - RNA, 20 nt, Artificial Sequence
  HTT spacer sequence GTCN PAM
guuugcugggcguuucauuc

SEQ ID NO: 23292 - RNA, 20 nt, Artificial Sequence
  HTT spacer sequence GTCN PAM
ucucagaggcugccccuguu

SEQ ID NO: 23293 - RNA, 20 nt, Artificial Sequence
  HTT spacer sequence GTCN PAM
uuacaguaaacggcaugagg

SEQ ID NO: 23294 - RNA, 20 nt, Artificial Sequence
  HTT spacer sequence GTCN PAM
uggauaucgagcaguucucg

SEQ ID NO: 23295 - RNA, 20 nt, Artificial Sequence
  HTT spacer sequence GTCN PAM
agguagaucccuuucaccac

SEQ ID NO: 23296 - RNA, 20 nt, Artificial Sequence
  HTT spacer sequence GTCN PAM
ucaucugcgguguccaggua

SEQ ID NO: 23297 - RNA, 20 nt, Artificial Sequence
  HTT spacer sequence GTCN PAM
ccauccccuggcagaaugag

SEQ ID NO: 23298 - RNA, 20 nt, Artificial Sequence
  HTT spacer sequence GTCN PAM
cuguuggaacuaacguaaag

SEQ ID NO: 23299 - RNA, 20 nt, Artificial Sequence
  HTT spacer sequence GTCN PAM
gugugugugugugugucugu

SEQ ID NO: 23300 - RNA, 20 nt, Artificial Sequence
  HTT spacer sequence GTCN PAM
guguguauuugggagauaaa

SEQ ID NO: 23301 - RNA, 20 nt, Artificial Sequence
  HTT spacer sequence GTCN PAM
uauauaauuuuaucucccaa

SEQ ID NO: 23302 - RNA, 20 nt, Artificial Sequence
  HTT spacer sequence GTCN PAM
ggaguucgagaccagccugg

SEQ ID NO: 23303 - RNA, 20 nt, Artificial Sequence
  HTT spacer sequence GTCN PAM
cgaacuccugaccucaugau

SEQ ID NO: 23304 - RNA, 20 nt, Artificial Sequence
  HTT spacer sequence GTCN PAM
cuacuaaaaguacaaaaauu

SEQ ID NO: 23305 - RNA, 20 nt, Artificial Sequence
  HTT spacer sequence GTCN PAM
cagcuaguagggaugcugag

SEQ ID NO: 23306 - RNA, 20 nt, Artificial Sequence
  HTT spacer sequence GTCN PAM
cccaagguggaguacagugg

SEQ ID NO: 23307 - RNA, 20 nt, Artificial Sequence
  HTT spacer sequence GTCN PAM
cguucugucgcccaaggugg

SEQ ID NO: 23308 - RNA, 20 nt, Artificial Sequence
  HTT spacer sequence GTCN PAM
cacccaaaaaaaaaaaaaaa

SEQ ID NO: 23309 - RNA, 20 nt, Artificial Sequence
  HTT spacer sequence GTCN PAM
uauacaaucuuuuuuuuuuu

SEQ ID NO: 23310 - RNA, 20 nt, Artificial Sequence
  HTT spacer sequence GTCN PAM
aaagucuuauacaaucuuuu

SEQ ID NO: 23311 - RNA, 20 nt, Artificial Sequence
  HTT spacer sequence GTCN PAM
uguggucaaaagucuuauac

SEQ ID NO: 23312 - RNA, 20 nt, Artificial Sequence
  HTT spacer sequence GTCN PAM
aguccuguggucaaaagucu

SEQ ID NO: 23313 - RNA, 20 nt, Artificial Sequence
  HTT spacer sequence GTCN PAM
uuggcuugcccauggucuag

SEQ ID NO: 23314 - RNA, 20 nt, Artificial Sequence
  HTT spacer sequence GTCN PAM
agaagcacagcggcuguccc

SEQ ID NO: 23315 - RNA, 20 nt, Artificial Sequence
  HTT spacer sequence GTCN PAM
cuggucccaaugacaggaag

SEQ ID NO: 23316 - RNA, 20 nt, Artificial Sequence
  HTT spacer sequence GTCN PAM
caaugacaggaaguggacag

SEQ ID NO: 23317 - RNA, 20 nt, Artificial Sequence
  HTT spacer sequence GTCN PAM
uugggaccagggacagccgc

SEQ ID NO: 23318 - RNA, 20 nt, Artificial Sequence
  HTT spacer sequence GTCN PAM
acuuccugucauugggacca

SEQ ID NO: 23319 - RNA, 20 nt, Artificial Sequence
  HTT spacer sequence GTCN PAM
gaugggagcuugccugccac

SEQ ID NO: 23320 - RNA, 20 nt, Artificial Sequence
  HTT spacer sequence GTCN PAM
cugaguguacucccaaagca

SEQ ID NO: 23321 - RNA, 20 nt, Artificial Sequence
  HTT spacer sequence GTCN PAM
ccucuccccuugucucugag

SEQ ID NO: 23322 - RNA, 20 nt, Artificial Sequence
  HTT spacer sequence GTCN PAM
ggaagcagggaaggaggaac

SEQ ID NO: 23323 - RNA, 20 nt, Artificial Sequence
  HTT spacer sequence GTCN PAM
cccagugccagcagcuccug

SEQ ID NO: 23324 - RNA, 20 nt, Artificial Sequence
  HTT spacer sequence GTCN PAM
gugggugucucccagugcca

SEQ ID NO: 23325 - RNA, 20 nt, Artificial Sequence
  HTT spacer sequence GTCN PAM
uguuauucugugcaugcaga

SEQ ID NO: 23326 - RNA, 20 nt, Artificial Sequence
  HTT spacer sequence GTCN PAM
uugaaacacccagauucgau

SEQ ID NO: 23327 - RNA, 20 nt, Artificial Sequence
  HTT spacer sequence GTCN PAM
agaucuaauggcaaagcuuc

SEQ ID NO: 23328 - RNA, 20 nt, Artificial Sequence
  HTT spacer sequence GTCN PAM
ggaaaccgggguauguaugu

SEQ ID NO: 23329 - RNA, 20 nt, Artificial Sequence
  HTT spacer sequence GTCN PAM
auagaagaagccucuguuug

SEQ ID NO: 23330 - RNA, 20 nt, Artificial Sequence
  HTT spacer sequence GTCN PAM
uuuuaccccucuucugaaga

SEQ ID NO: 23331 - RNA, 20 nt, Artificial Sequence
  HTT spacer sequence GTCN PAM
guauguuuuuuuuuuuuuca

SEQ ID NO: 23332 - RNA, 20 nt, Artificial Sequence
  HTT spacer sequence GTCN PAM
gagagccacauggugcuagg

SEQ ID NO: 23333 - RNA, 20 nt, Artificial Sequence
  HTT spacer sequence GTCN PAM
ucaucccagcaacaaaccuc

SEQ ID NO: 23334 - RNA, 20 nt, Artificial Sequence
  HTT spacer sequence GTCN PAM
uguuuuggaucagaacaguc

SEQ ID NO: 23335 - RNA, 20 nt, Artificial Sequence
  HTT spacer sequence GTCN PAM
cugacaaaauaguuuacacu

SEQ ID NO: 23336 - RNA, 20 nt, Artificial Sequence
  HTT spacer sequence GTCN PAM
gcgacacgggaaccuguuug

SEQ ID NO: 23337 - RNA, 20 nt, Artificial Sequence
  HTT spacer sequence GTCN PAM
gauggcacucacagugcauc

SEQ ID NO: 23338 - RNA, 20 nt, Artificial Sequence
  HTT spacer sequence GTCN PAM
aagagccagagcagggagag

SEQ ID NO: 23339 - RNA, 20 nt, Artificial Sequence
  HTT spacer sequence GTCN PAM
ggaguuugagaccagccugg

SEQ ID NO: 23340 - RNA, 20 nt, Artificial Sequence
  HTT spacer sequence GTCN PAM
caaacuccugaccucaggug

SEQ ID NO: 23341 - RNA, 20 nt, Artificial Sequence
  HTT spacer sequence GTCN PAM
cagcuacuugggaggcugag

SEQ ID NO: 23342 - RNA, 20 nt, Artificial Sequence
  HTT spacer sequence GTCN PAM
ugcgcuguugcccaggcugg

SEQ ID NO: 23343 - RNA, 20 nt, Artificial Sequence
  HTT spacer sequence GTCN PAM
uuccaaaggauuccauuuuu

SEQ ID NO: 23344 - RNA, 20 nt, Artificial Sequence
  HTT spacer sequence GTCN PAM
acauuuaaugcuauuacaga

SEQ ID NO: 23345 - RNA, 20 nt, Artificial Sequence
  HTT spacer sequence GTCN PAM
cuccuuggauucgugggcca

SEQ ID NO: 23346 - RNA, 20 nt, Artificial Sequence
  HTT spacer sequence GTCN PAM
ggaguucaagaccagcuuag

SEQ ID NO: 23347 - RNA, 20 nt, Artificial Sequence
  HTT spacer sequence GTCN PAM
ugaacuccugaccucaggug

SEQ ID NO: 23348 - RNA, 20 nt, Artificial Sequence
  HTT spacer sequence GTCN PAM
ugguggcaugugccuguaau

SEQ ID NO: 23349 - RNA, 20 nt, Artificial Sequence
  HTT spacer sequence GTCN PAM
gaggcaggagaaucgcuuga

SEQ ID NO: 23350 - RNA, 20 nt, Artificial Sequence
  HTT spacer sequence GTCN PAM
cggcucccuguaaccuccgc

SEQ ID NO: 23351 - RNA, 20 nt, Artificial Sequence
  HTT spacer sequence GTCN PAM
cccaggcuggagcgcaaugg

SEQ ID NO: 23352 - RNA, 20 nt, Artificial Sequence
  HTT spacer sequence GTCN PAM
uaaaaaaaaaaaaaaaaaaa

SEQ ID NO: 23353 - RNA, 20 nt, Artificial Sequence
  HTT spacer sequence GTCN PAM
uuccucugagaacuaagggu

SEQ ID NO: 23354 - RNA, 20 nt, Artificial Sequence
  HTT spacer sequence GTCN PAM
gggagagccauuuuguuagu

SEQ ID NO: 23355 - RNA, 20 nt, Artificial Sequence
  HTT spacer sequence GTCN PAM
caguguccacacuuggagau

SEQ ID NO: 23356 - RNA, 20 nt, Artificial Sequence
  HTT spacer sequence GTCN PAM
acacuuggagauggaaccca

SEQ ID NO: 23357 - RNA, 20 nt, Artificial Sequence
  HTT spacer sequence GTCN PAM
cuggcugccuaagaagcagu

SEQ ID NO: 23358 - RNA, 20 nt, Artificial Sequence
  HTT spacer sequence GTCN PAM
cagggucucuggcugccuaa

SEQ ID NO: 23359 - RNA, 20 nt, Artificial Sequence
  HTT spacer sequence GTCN PAM
cugcuaaaaauacaaaacuu

SEQ ID NO: 23360 - RNA, 20 nt, Artificial Sequence
  HTT spacer sequence GTCN PAM
uagcuacucaggaggcugag

SEQ ID NO: 23361 - RNA, 20 nt, Artificial Sequence
  HTT spacer sequence GTCN PAM
cccaggcuggagugcaaugg

SEQ ID NO: 23362 - RNA, 20 nt, Artificial Sequence
  HTT spacer sequence GTCN PAM
cacucugucgcccaggcugg

SEQ ID NO: 23363 - RNA, 20 nt, Artificial Sequence
  HTT spacer sequence GTCN PAM
caaaaaauaaauaaauaaau

SEQ ID NO: 23364 - RNA, 20 nt, Artificial Sequence
  HTT spacer sequence GTCN PAM
gcacuuaaggaaagugaaac

SEQ ID NO: 23365 - RNA, 20 nt, Artificial Sequence
  HTT spacer sequence GTCN PAM
ggcagcccuacaacacacag

SEQ ID NO: 23366 - RNA, 20 nt, Artificial Sequence
  HTT spacer sequence GTCN PAM
ccagugagaaggaaguggaa

SEQ ID NO: 23367 - RNA, 20 nt, Artificial Sequence
  HTT spacer sequence GTCN PAM
gcaccggggugcucagcauu

SEQ ID NO: 23368 - RNA, 20 nt, Artificial Sequence
  HTT spacer sequence GTCN PAM
gcucugugguccgcaccggg

SEQ ID NO: 23369 - RNA, 20 nt, Artificial Sequence
  HTT spacer sequence GTCN PAM
cgucccaccuggaauuguaa

SEQ ID NO: 23370 - RNA, 20 nt, Artificial Sequence
  HTT spacer sequence GTCN PAM
caccuggaauuguaauaaau

SEQ ID NO: 23371 - RNA, 20 nt, Artificial Sequence
  HTT spacer sequence GTCN PAM
guacacucccaaggcauguu

SEQ ID NO: 23372 - RNA, 20 nt, Artificial Sequence
  HTT spacer sequence GTCN PAM
uuucacuaaagcuggauuga

SEQ ID NO: 23373 - RNA, 20 nt, Artificial Sequence
  HTT spacer sequence GTCN PAM
ggggccucagggguacucuu

SEQ ID NO: 23374 - RNA, 20 nt, Artificial Sequence
  HTT spacer sequence GTCN PAM
uccauucccaagcccccgcu

SEQ ID NO: 23375 - RNA, 20 nt, Artificial Sequence
  HTT spacer sequence GTCN PAM
ggggguggcgcgaggcacug

SEQ ID NO: 23376 - RNA, 20 nt, Artificial Sequence
  HTT spacer sequence GTCN PAM
caccacucggccagagaugu

SEQ ID NO: 23377 - RNA, 20 nt, Artificial Sequence
  HTT spacer sequence GTCN PAM
aggaagagagggggcggccg

SEQ ID NO: 23378 - RNA, 20 nt, Artificial Sequence
  HTT spacer sequence GTCN PAM
gacaguccgagcccguuggc

SEQ ID NO: 23379 - RNA, 20 nt, Artificial Sequence
  HTT spacer sequence GTCN PAM
gacacccgggcccuggggaa

SEQ ID NO: 23380 - RNA, 20 nt, Artificial Sequence
  HTT spacer sequence GTCN PAM
gagcccguuggcauuccugc

SEQ ID NO: 23381 - RNA, 20 nt, Artificial Sequence
  HTT spacer sequence GTCN PAM
cguugccuugugccccucac

SEQ ID NO: 23382 - RNA, 20 nt, Artificial Sequence
  HTT spacer sequence GTCN PAM
uggggagccgccccuuucaa

SEQ ID NO: 23383 - RNA, 20 nt, Artificial Sequence
  HTT spacer sequence GTCN PAM
gggccuggcggccagggcuc

SEQ ID NO: 23384 - RNA, 20 nt, Artificial Sequence
  HTT spacer sequence GTCN PAM
ccgcaugccgggcgcaccug

SEQ ID NO: 23385 - RNA, 20 nt, Artificial Sequence
  HTT spacer sequence GTCN PAM
acgucagggcccccgagagg

SEQ ID NO: 23386 - RNA, 20 nt, Artificial Sequence
  HTT spacer sequence GTCN PAM
gggcccccgagaggccggua

SEQ ID NO: 23387 - RNA, 20 nt, Artificial Sequence
  HTT spacer sequence GTCN PAM
gggaugaggagcccgcccuc

SEQ ID NO: 23388 - RNA, 20 nt, Artificial Sequence
  HTT spacer sequence GTCN PAM
ccccgcgggugagcacccca

SEQ ID NO: 23389 - RNA, 20 nt, Artificial Sequence
  HTT spacer sequence GTCN PAM
acacccuuccgcuacgcccu

SEQ ID NO: 23390 - RNA, 20 nt, Artificial Sequence
  HTT spacer sequence GTCN PAM
cccccugggaaaucuucaug

SEQ ID NO: 23391 - RNA, 20 nt, Artificial Sequence
  HTT spacer sequence GTCN PAM
cuccuguucgcuccccgccc

SEQ ID NO: 23392 - RNA, 20 nt, Artificial Sequence
  HTT spacer sequence GTCN PAM
gcucuggggccucagcccuc

SEQ ID NO: 23393 - RNA, 20 nt, Artificial Sequence
  HTT spacer sequence GTCN PAM
agugcugcccugcccugcgg

SEQ ID NO: 23394 - RNA, 20 nt, Artificial Sequence
  HTT spacer sequence GTCN PAM
gcuccucccugaaccagccc

SEQ ID NO: 23395 - RNA, 20 nt, Artificial Sequence
  HTT spacer sequence GTCN PAM
ccgucagcuccucccugaac

SEQ ID NO: 23396 - RNA, 20 nt, Artificial Sequence
  HTT spacer sequence GTCN PAM
gggcugccuggagccugcag

SEQ ID NO: 23397 - RNA, 20 nt, Artificial Sequence
  HTT spacer sequence GTCN PAM
ccgaggccugugcccuggcu

SEQ ID NO: 23398 - RNA, 20 nt, Artificial Sequence
  HTT spacer sequence GTCN PAM
gguucaaagucaccgaggcc

SEQ ID NO: 23399 - RNA, 20 nt, Artificial Sequence
  HTT spacer sequence GTCN PAM
cugucugguucaaagucacc

SEQ ID NO: 23400 - RNA, 20 nt, Artificial Sequence
  HTT spacer sequence GTCN PAM
gaugugucacugucugguuc

SEQ ID NO: 23401 - RNA, 20 nt, Artificial Sequence
  HTT spacer sequence GTCN PAM
cucaggcacugugguuccuc

SEQ ID NO: 23402 - RNA, 20 nt, Artificial Sequence
  HTT spacer sequence GTCN PAM
cuccugcugcucuugugaaa

SEQ ID NO: 23403 - RNA, 20 nt, Artificial Sequence
  HTT spacer sequence GTCN PAM
gccuggaagccuggucgcuc

SEQ ID NO: 23404 - RNA, 20 nt, Artificial Sequence
  HTT spacer sequence GTCN PAM
ugggaggaaaacaccagcgg

SEQ ID NO: 23405 - RNA, 20 nt, Artificial Sequence
  HTT spacer sequence GTCN PAM
ccaugagguugggagccuuc

SEQ ID NO: 23406 - RNA, 20 nt, Artificial Sequence
  HTT spacer sequence GTCN PAM
ccuuccccuuccccucguac

SEQ ID NO: 23407 - RNA, 20 nt, Artificial Sequence
  HTT spacer sequence GTCN PAM
ccaagauaacguccccuucc

SEQ ID NO: 23408 - RNA, 20 nt, Artificial Sequence
  HTT spacer sequence GTCN PAM
uuauucuuugggggaaugga

SEQ ID NO: 23409 - RNA, 20 nt, Artificial Sequence
  HTT spacer sequence GTCN PAM
cccgcuuccaaaaagccuua

SEQ ID NO: 23410 - RNA, 20 nt, Artificial Sequence
  HTT spacer sequence GTCN PAM
cgccgcggucacccgcuucc

SEQ ID NO: 23411 - RNA, 20 nt, Artificial Sequence
  HTT spacer sequence GTCN PAM
agagucccgccgcggucacc

SEQ ID NO: 23412 - RNA, 20 nt, Artificial Sequence
  HTT spacer sequence GTCN PAM
ucagcugcagaaugaagaug

SEQ ID NO: 23413 - RNA, 20 nt, Artificial Sequence
  HTT spacer sequence GTCN PAM
guaaaucauguagcacagug

SEQ ID NO: 23414 - RNA, 20 nt, Artificial Sequence
  HTT spacer sequence GTCN PAM
ccauucaguaacuaugccaa

SEQ ID NO: 23415 - RNA, 20 nt, Artificial Sequence
  HTT spacer sequence GTCN PAM
gaguggaaaugggggugggg

SEQ ID NO: 23416 - RNA, 20 nt, Artificial Sequence
  HTT spacer sequence GTCN PAM
acacugauggaagaacuccu

SEQ ID NO: 23417 - RNA, 20 nt, Artificial Sequence
  HTT spacer sequence GTCN PAM
acagcggaaucacaguguag

SEQ ID NO: 23418 - RNA, 20 nt, Artificial Sequence
  HTT spacer sequence GTCN PAM
acacugugauuccgcugugg

SEQ ID NO: 23419 - RNA, 20 nt, Artificial Sequence
  HTT spacer sequence GTCN PAM
ucuacacugugauuccgcug

SEQ ID NO: 23420 - RNA, 20 nt, Artificial Sequence
  HTT spacer sequence GTCN PAM
ccagcccccagcagagucgu

SEQ ID NO: 23421 - RNA, 20 nt, Artificial Sequence
  HTT spacer sequence GTCN PAM
ucagcccagccaggucccca

SEQ ID NO: 23422 - RNA, 20 nt, Artificial Sequence
  HTT spacer sequence GTCN PAM
gguccucagcccagccaggu

SEQ ID NO: 23423 - RNA, 20 nt, Artificial Sequence
  HTT spacer sequence GTCN PAM
cuaaacuucaacaccugcgc

SEQ ID NO: 23424 - RNA, 20 nt, Artificial Sequence
  HTT spacer sequence GTCN PAM
gaggcauuugaacaagagca

SEQ ID NO: 23425 - RNA, 20 nt, Artificial Sequence
  HTT spacer sequence GTCN PAM
caggcucauuuuacccagcc

SEQ ID NO: 23426 - RNA, 20 nt, Artificial Sequence
  HTT spacer sequence GTCN PAM
caaagagcuugcugauaaaa

SEQ ID NO: 23427 - RNA, 20 nt, Artificial Sequence
  HTT spacer sequence GTCN PAM
guuuuaucagcaagcucuuu

SEQ ID NO: 23428 - RNA, 20 nt, Artificial Sequence
  HTT spacer sequence GTCN PAM
cuaacuccuggccucaagug

SEQ ID NO: 23429 - RNA, 20 nt, Artificial Sequence
  HTT spacer sequence GTCN PAM
cuaauacaaaaauuagccag

SEQ ID NO: 23430 - RNA, 20 nt, Artificial Sequence
  HTT spacer sequence GTCN PAM
cagcuacucgggaggcugag

SEQ ID NO: 23431 - RNA, 20 nt, Artificial Sequence
  HTT spacer sequence GTCN PAM
gaggcugcagugagccgaga

SEQ ID NO: 23432 - RNA, 20 nt, Artificial Sequence
  HTT spacer sequence GTCN PAM
cggcucacugcagccucuga

SEQ ID NO: 23433 - RNA, 20 nt, Artificial Sequence
  HTT spacer sequence GTCN PAM
ugcucuguugcccaggucuc

SEQ ID NO: 23434 - RNA, 20 nt, Artificial Sequence
  HTT spacer sequence GTCN PAM
caaaaaaaauaauaaaauaa

SEQ ID NO: 23435 - RNA, 20 nt, Artificial Sequence
  HTT spacer sequence GTCN PAM
cucucaucgccaucuugguu

SEQ ID NO: 23436 - RNA, 20 nt, Artificial Sequence
  HTT spacer sequence GTCN PAM
uccucacagcucauuacaug

SEQ ID NO: 23437 - RNA, 20 nt, Artificial Sequence
  HTT spacer sequence GTCN PAM
uuuggcauguuaaugcauua

SEQ ID NO: 23438 - RNA, 20 nt, Artificial Sequence
  HTT spacer sequence GTCN PAM
uggcgcugaugggagugucu

SEQ ID NO: 23439 - RNA, 20 nt, Artificial Sequence
  HTT spacer sequence GTCN PAM
gaaagcuacccuguauguuc

SEQ ID NO: 23440 - RNA, 20 nt, Artificial Sequence
  HTT spacer sequence GTCN PAM
ggaucgggaccccuguccag

SEQ ID NO: 23441 - RNA, 20 nt, Artificial Sequence
  HTT spacer sequence GTCN PAM
cgauccagaccccaaaagag

SEQ ID NO: 23442 - RNA, 20 nt, Artificial Sequence
  HTT spacer sequence GTCN PAM
aguagcacucccuccaucuu

SEQ ID NO: 23443 - RNA, 20 nt, Artificial Sequence
  HTT spacer sequence GTCN PAM
aguuuccuccucagcaggca

SEQ ID NO: 23444 - RNA, 20 nt, Artificial Sequence
  HTT spacer sequence GTCN PAM
guucccaggucuaguuuccu

SEQ ID NO: 23445 - RNA, 20 nt, Artificial Sequence
  HTT spacer sequence GTCN PAM
uuuuuguuucuuuguuucuu

SEQ ID NO: 23446 - RNA, 20 nt, Artificial Sequence
  HTT spacer sequence GTCN PAM
gaguuaaauuuccccaugcc

SEQ ID NO: 23447 - RNA, 20 nt, Artificial Sequence
  HTT spacer sequence GTCN PAM
aagcuuucacuugggcaugg

SEQ ID NO: 23448 - RNA, 20 nt, Artificial Sequence
  HTT spacer sequence GTCN PAM
guguacaaauccuggccuag

SEQ ID NO: 23449 - RNA, 20 nt, Artificial Sequence
  HTT spacer sequence GTCN PAM
uugugcaggggcaaugcuaa

SEQ ID NO: 23450 - RNA, 20 nt, Artificial Sequence
  HTT spacer sequence GTCN PAM
uccuugugcaggggcaaugc

SEQ ID NO: 23451 - RNA, 20 nt, Artificial Sequence
  HTT spacer sequence GTCN PAM
uuaauauuagcugcugugca

SEQ ID NO: 23452 - RNA, 20 nt, Artificial Sequence
  HTT spacer sequence GTCN PAM
uuuggcugcuuaaauuuuua

SEQ ID NO: 23453 - RNA, 20 nt, Artificial Sequence
  HTT spacer sequence GTCN PAM
cgcucuguugcccaggcugg

SEQ ID NO: 23454 - RNA, 20 nt, Artificial Sequence
  HTT spacer sequence GTCN PAM
acauggugaaaccccaucug

SEQ ID NO: 23455 - RNA, 20 nt, Artificial Sequence
  HTT spacer sequence GTCN PAM
cgaaccccuggccuuaagua

SEQ ID NO: 23456 - RNA, 20 nt, Artificial Sequence
  HTT spacer sequence GTCN PAM
uccaugauauugugaaguua

SEQ ID NO: 23457 - RNA, 20 nt, Artificial Sequence
  HTT spacer sequence GTCN PAM
ccuggcauauauuuccccaa

SEQ ID NO: 23458 - RNA, 20 nt, Artificial Sequence
  HTT spacer sequence GTCN PAM
uuuuuguauguuaaugaggu

SEQ ID NO: 23459 - RNA, 20 nt, Artificial Sequence
  HTT spacer sequence GTCN PAM
aggagccaccagccaccuca

SEQ ID NO: 23460 - RNA, 20 nt, Artificial Sequence
  HTT spacer sequence GTCN PAM
ccagaaagaagaagguaggg

SEQ ID NO: 23461 - RNA, 20 nt, Artificial Sequence
  HTT spacer sequence GTCN PAM
caaccuucuaacccuaccuu

SEQ ID NO: 23462 - RNA, 20 nt, Artificial Sequence
  HTT spacer sequence GTCN PAM
ucuuggguuuuuauggaggc

SEQ ID NO: 23463 - RNA, 20 nt, Artificial Sequence
  HTT spacer sequence GTCN PAM
ccguagaagggaggugcgcu

SEQ ID NO: 23464 - RNA, 20 nt, Artificial Sequence
  HTT spacer sequence GTCN PAM
caagcacaggagcuucuguc

SEQ ID NO: 23465 - RNA, 20 nt, Artificial Sequence
  HTT spacer sequence GTCN PAM
gucagaaucacaggccaaau

SEQ ID NO: 23466 - RNA, 20 nt, Artificial Sequence
  HTT spacer sequence GTCN PAM
gaaucacaggccaaauaacc

SEQ ID NO: 23467 - RNA, 20 nt, Artificial Sequence
  HTT spacer sequence GTCN PAM
ugugggaacugaguccucga

SEQ ID NO: 23468 - RNA, 20 nt, Artificial Sequence
  HTT spacer sequence GTCN PAM
ucgaucuguguggucaggcg

SEQ ID NO: 23469 - RNA, 20 nt, Artificial Sequence
  HTT spacer sequence GTCN PAM
ggcgcugucuacagguagau

SEQ ID NO: 23470 - RNA, 20 nt, Artificial Sequence
  HTT spacer sequence GTCN PAM
acagguagaugccgucagac

SEQ ID NO: 23471 - RNA, 20 nt, Artificial Sequence
  HTT spacer sequence GTCN PAM
gacuugaaugagaggacacc

SEQ ID NO: 23472 - RNA, 20 nt, Artificial Sequence
  HTT spacer sequence GTCN PAM
gacggcaucuaccuguagac

SEQ ID NO: 23473 - RNA, 20 nt, Artificial Sequence
  HTT spacer sequence GTCN PAM
ucucauucaagucugacggc

SEQ ID NO: 23474 - RNA, 20 nt, Artificial Sequence
  HTT spacer sequence GTCN PAM
gcugcagaacugauugcuug

SEQ ID NO: 23475 - RNA, 20 nt, Artificial Sequence
  HTT spacer sequence GTCN PAM
uuuuccuguucucucacuca

SEQ ID NO: 23476 - RNA, 20 nt, Artificial Sequence
  HTT spacer sequence GTCN PAM
cguguucaaaaaauguuggg

SEQ ID NO: 23477 - RNA, 20 nt, Artificial Sequence
  HTT spacer sequence GTCN PAM
gagggaggaaaaccacaucc

SEQ ID NO: 23478 - RNA, 20 nt, Artificial Sequence
  HTT spacer sequence GTCN PAM
aaaggugaagcagaggacac

SEQ ID NO: 23479 - RNA, 20 nt, Artificial Sequence
  HTT spacer sequence GTCN PAM
ucugcuucaccuuuugacgu

SEQ ID NO: 23480 - RNA, 20 nt, Artificial Sequence
  HTT spacer sequence GTCN PAM
ccagaggcggugcagugagg

SEQ ID NO: 23481 - RNA, 20 nt, Artificial Sequence
  HTT spacer sequence GTCN PAM
cuuaccaggaagggaagcau

SEQ ID NO: 23482 - RNA, 20 nt, Artificial Sequence
  HTT spacer sequence GTCN PAM
guucuuuuuuucuagagcug

SEQ ID NO: 23483 - RNA, 20 nt, Artificial Sequence
  HTT spacer sequence GTCN PAM
gaccuguccugucacggcca

SEQ ID NO: 23484 - RNA, 20 nt, Artificial Sequence
  HTT spacer sequence GTCN PAM
gacucgccucagugugcccc

SEQ ID NO: 23485 - RNA, 20 nt, Artificial Sequence
  HTT spacer sequence GTCN PAM
ugucacggccaggaacucag

SEQ ID NO: 23486 - RNA, 20 nt, Artificial Sequence
  HTT spacer sequence GTCN PAM
cggccaggaacucaguuuuu

SEQ ID NO: 23487 - RNA, 20 nt, Artificial Sequence
  HTT spacer sequence GTCN PAM
ccucgaccaagaagcggucc

SEQ ID NO: 23488 - RNA, 20 nt, Artificial Sequence
  HTT spacer sequence GTCN PAM
aggagaccucagagaaaccu

SEQ ID NO: 23489 - RNA, 20 nt, Artificial Sequence
  HTT spacer sequence GTCN PAM
gcucaguuggcagggguuuu

SEQ ID NO: 23490 - RNA, 20 nt, Artificial Sequence
  HTT spacer sequence GTCN PAM
cucugaaucugcugugauuc

SEQ ID NO: 23491 - RNA, 20 nt, Artificial Sequence
  HTT spacer sequence GTCN PAM
gaacaaaucuauagacaaaa

SEQ ID NO: 23492 - RNA, 20 nt, Artificial Sequence
  HTT spacer sequence GTCN PAM
auagauuuguucugaccacg

SEQ ID NO: 23493 - RNA, 20 nt, Artificial Sequence
  HTT spacer sequence GTCN PAM
cuucccuuuuuugucuauag

SEQ ID NO: 23494 - RNA, 20 nt, Artificial Sequence
  HTT spacer sequence GTCN PAM
aaauaaggcaaaugccgagc

SEQ ID NO: 23495 - RNA, 20 nt, Artificial Sequence
  HTT spacer sequence GTCN PAM
uggccaaucccagcagccgu

SEQ ID NO: 23496 - RNA, 20 nt, Artificial Sequence
  HTT spacer sequence GTCN PAM
gcaccuguggcaguaccuga

SEQ ID NO: 23497 - RNA, 20 nt, Artificial Sequence
  HTT spacer sequence GTCN PAM
ggguuucagucuugucuacc

SEQ ID NO: 23498 - RNA, 20 nt, Artificial Sequence
  HTT spacer sequence GTCN PAM
ugucuaccaauuaaguuagg

SEQ ID NO: 23499 - RNA, 20 nt, Artificial Sequence
  HTT spacer sequence GTCN PAM
accaauuaaguuagguugca

SEQ ID NO: 23500 - RNA, 20 nt, Artificial Sequence
  HTT spacer sequence GTCN PAM
acaaggacucaaauagagaa

SEQ ID NO: 23501 - RNA, 20 nt, Artificial Sequence
  HTT spacer sequence GTCN PAM
uuguggacgaacugcaaccu

SEQ ID NO: 23502 - RNA, 20 nt, Artificial Sequence
  HTT spacer sequence GTCN PAM
uucucaggccauauuuaguu

SEQ ID NO: 23503 - RNA, 20 nt, Artificial Sequence
  HTT spacer sequence GTCN PAM
uuuucucaauuuugagagau

SEQ ID NO: 23504 - RNA, 20 nt, Artificial Sequence
  HTT spacer sequence GTCN PAM
aucucucaaaauugagaaaa

SEQ ID NO: 23505 - RNA, 20 nt, Artificial Sequence
  HTT spacer sequence GTCN PAM
uugaugucacuaucaccauc

SEQ ID NO: 23506 - RNA, 20 nt, Artificial Sequence
  HTT spacer sequence GTCN PAM
cuaucaccaucguaaaugua

SEQ ID NO: 23507 - RNA, 20 nt, Artificial Sequence
  HTT spacer sequence GTCN PAM
ugaaacccucugagaaacag

SEQ ID NO: 23508 - RNA, 20 nt, Artificial Sequence
  HTT spacer sequence GTCN PAM
uuguuccuaccuuugcaaaa

SEQ ID NO: 23509 - RNA, 20 nt, Artificial Sequence
  HTT spacer sequence GTCN PAM
uguuuauaggggaaucuguu

SEQ ID NO: 23510 - RNA, 20 nt, Artificial Sequence
  HTT spacer sequence GTCN PAM
uaguuugauuaugucacauu

SEQ ID NO: 23511 - RNA, 20 nt, Artificial Sequence
  HTT spacer sequence GTCN PAM
cauuuagcaugagugacucc

SEQ ID NO: 23512 - RNA, 20 nt, Artificial Sequence
  HTT spacer sequence GTCN PAM
cucaugcuaaaugugacaua

SEQ ID NO: 23513 - RNA, 20 nt, Artificial Sequence
  HTT spacer sequence GTCN PAM
guugggacauagugcaugag

SEQ ID NO: 23514 - RNA, 20 nt, Artificial Sequence
  HTT spacer sequence GTCN PAM
caacagacuaagccaaacaa

SEQ ID NO: 23515 - RNA, 20 nt, Artificial Sequence
  HTT spacer sequence GTCN PAM
aaaacaauggccucccauaa

SEQ ID NO: 23516 - RNA, 20 nt, Artificial Sequence
  HTT spacer sequence GTCN PAM
agguucucacuuaggugagu

SEQ ID NO: 23517 - RNA, 20 nt, Artificial Sequence
  HTT spacer sequence GTCN PAM
ugccuuggcagcuggguggc

SEQ ID NO: 23518 - RNA, 20 nt, Artificial Sequence
  HTT spacer sequence GTCN PAM
ggagaucgagaccauccugg

SEQ ID NO: 23519 - RNA, 20 nt, Artificial Sequence
  HTT spacer sequence GTCN PAM
cgaucuccugaccucaugau

SEQ ID NO: 23520 - RNA, 20 nt, Artificial Sequence
  HTT spacer sequence GTCN PAM
cuacuaaaaauacaaaaaau

SEQ ID NO: 23521 - RNA, 20 nt, Artificial Sequence
  HTT spacer sequence GTCN PAM
cagcuacucgggaggcugag

SEQ ID NO: 23522 - RNA, 20 nt, Artificial Sequence
  HTT spacer sequence GTCN PAM
cccaggcuggagggcagugg

SEQ ID NO: 23523 - RNA, 20 nt, Artificial Sequence
  HTT spacer sequence GTCN PAM
cgcucugucacccaggcugg

SEQ ID NO: 23524 - RNA, 20 nt, Artificial Sequence
  HTT spacer sequence GTCN PAM
caaaaaacaaaaacaaaaac

SEQ ID NO: 23525 - RNA, 20 nt, Artificial Sequence
  HTT spacer sequence GTCN PAM
uaucuaaucauaucuauaau

SEQ ID NO: 23526 - RNA, 20 nt, Artificial Sequence
  HTT spacer sequence GTCN PAM
cuucagcuccuaucucugua

SEQ ID NO: 23527 - RNA, 20 nt, Artificial Sequence
  HTT spacer sequence GTCN PAM
cuucucacccugucccuuca

SEQ ID NO: 23528 - RNA, 20 nt, Artificial Sequence
  HTT spacer sequence GTCN PAM
ucuggucacuucucacccug

SEQ ID NO: 23529 - RNA, 20 nt, Artificial Sequence
  HTT spacer sequence GTCN PAM
cgcucagacagggccacuag

SEQ ID NO: 23530 - RNA, 20 nt, Artificial Sequence
  HTT spacer sequence GTCN PAM
gagcgugacagagggcucac

SEQ ID NO: 23531 - RNA, 20 nt, Artificial Sequence
  HTT spacer sequence GTCN PAM
agugguaaugacagugccug

SEQ ID NO: 23532 - RNA, 20 nt, Artificial Sequence
  HTT spacer sequence GTCN PAM
uuaccacuagaccagggagc

SEQ ID NO: 23533 - RNA, 20 nt, Artificial Sequence
  HTT spacer sequence GTCN PAM
gcuaaguaacaggugccuuc

SEQ ID NO: 23534 - RNA, 20 nt, Artificial Sequence
  HTT spacer sequence GTCN PAM
cccuuuggccaggggagagg

SEQ ID NO: 23535 - RNA, 20 nt, Artificial Sequence
  HTT spacer sequence GTCN PAM
ucucuaaccccuccgccccu

SEQ ID NO: 23536 - RNA, 20 nt, Artificial Sequence
  HTT spacer sequence GTCN PAM
ggccuuccacaagagauggu

SEQ ID NO: 23537 - RNA, 20 nt, Artificial Sequence
  HTT spacer sequence GTCN PAM
ggcccgcccacagccauccg

SEQ ID NO: 23538 - RNA, 20 nt, Artificial Sequence
  HTT spacer sequence GTCN PAM
ggccuccggauggcuguggg

SEQ ID NO: 23539 - RNA, 20 nt, Artificial Sequence
  HTT spacer sequence GTCN PAM
cgcuccuguuucacuuucau

SEQ ID NO: 23540 - RNA, 20 nt, Artificial Sequence
  HTT spacer sequence GTCN PAM
uugaaaugcauagaagaaau

SEQ ID NO: 23541 - RNA, 20 nt, Artificial Sequence
  HTT spacer sequence GTCN PAM
uuauuucuucuaugcauuuc

SEQ ID NO: 23542 - RNA, 20 nt, Artificial Sequence
  HTT spacer sequence GTCN PAM
ccucucucucuccgccucgg

SEQ ID NO: 23543 - RNA, 20 nt, Artificial Sequence
  HTT spacer sequence GTCN PAM
gguggacacgugacuugcgu

SEQ ID NO: 23544 - RNA, 20 nt, Artificial Sequence
  HTT spacer sequence GTCN PAM
accggacagggugcccuucc

SEQ ID NO: 23545 - RNA, 20 nt, Artificial Sequence
  HTT spacer sequence GTCN PAM
cguguccaccggacagggug

SEQ ID NO: 23546 - RNA, 20 nt, Artificial Sequence
  HTT spacer sequence GTCN PAM
cgcaagucacguguccaccg

SEQ ID NO: 23547 - RNA, 20 nt, Artificial Sequence
  HTT spacer sequence GTCN PAM
ggucacgcaagucacguguc

SEQ ID NO: 23548 - RNA, 20 nt, Artificial Sequence
  HTT spacer sequence GTCN PAM
ucuccaaugauaggucaggu

SEQ ID NO: 23549 - RNA, 20 nt, Artificial Sequence
  HTT spacer sequence GTCN PAM
uguauccaauaaguaacagg

SEQ ID NO: 23550 - RNA, 20 nt, Artificial Sequence
  HTT spacer sequence GTCN PAM
ccgugucuaggugguagugg

SEQ ID NO: 23551 - RNA, 20 nt, Artificial Sequence
  HTT spacer sequence GTCN PAM
aggugguagugguccccugg

SEQ ID NO: 23552 - RNA, 20 nt, Artificial Sequence
  HTT spacer sequence GTCN PAM
ccugggcccagcugucuuuu

SEQ ID NO: 23553 - RNA, 20 nt, Artificial Sequence
  HTT spacer sequence GTCN PAM
uuucuucuaucucuuugucu

SEQ ID NO: 23554 - RNA, 20 nt, Artificial Sequence
  HTT spacer sequence GTCN PAM
uguguccuuauuucugugau

SEQ ID NO: 23555 - RNA, 20 nt, Artificial Sequence
  HTT spacer sequence GTCN PAM
uuauuucugugaucucucau

SEQ ID NO: 23556 - RNA, 20 nt, Artificial Sequence
  HTT spacer sequence GTCN PAM
agcccuacugggccuguggg

SEQ ID NO: 23557 - RNA, 20 nt, Artificial Sequence
  HTT spacer sequence GTCN PAM
cacucucgccuguagggucc

SEQ ID NO: 23558 - RNA, 20 nt, Artificial Sequence
  HTT spacer sequence GTCN PAM
cagcacgucauucauagguu

SEQ ID NO: 23559 - RNA, 20 nt, Artificial Sequence
  HTT spacer sequence GTCN PAM
uucauagguuacgguguccu

SEQ ID NO: 23560 - RNA, 20 nt, Artificial Sequence
  HTT spacer sequence GTCN PAM
ucauggucacacauuucuuu

SEQ ID NO: 23561 - RNA, 20 nt, Artificial Sequence
  HTT spacer sequence GTCN PAM
cacauuucuuucagcuucug

SEQ ID NO: 23562 - RNA, 20 nt, Artificial Sequence
  HTT spacer sequence GTCN PAM
cucuucaacuggaauggcag

SEQ ID NO: 23563 - RNA, 20 nt, Artificial Sequence
  HTT spacer sequence GTCN PAM
gcaugcagccaucucuagaa

SEQ ID NO: 23564 - RNA, 20 nt, Artificial Sequence
  HTT spacer sequence GTCN PAM
cccuggugcgcugcauucuc

SEQ ID NO: 23565 - RNA, 20 nt, Artificial Sequence
  HTT spacer sequence GTCN PAM
cuauacaccaaaccacccca

SEQ ID NO: 23566 - RNA, 20 nt, Artificial Sequence
  HTT spacer sequence GTCN PAM
gaucuauuugauuuggggug

SEQ ID NO: 23567 - RNA, 20 nt, Artificial Sequence
  HTT spacer sequence GTCN PAM
auucuauuauuuagcauacc

SEQ ID NO: 23568 - RNA, 20 nt, Artificial Sequence
  HTT spacer sequence GTCN PAM
guuguguaacuauagccuuu

SEQ ID NO: 23569 - RNA, 20 nt, Artificial Sequence
  HTT spacer sequence GTCN PAM
gcuauacagccuaucaugag

SEQ ID NO: 23570 - RNA, 20 nt, Artificial Sequence
  HTT spacer sequence GTCN PAM
gaaacagaauaucgguucac

SEQ ID NO: 23571 - RNA, 20 nt, Artificial Sequence
  HTT spacer sequence GTCN PAM
cauuaaaguuucucaccuac

SEQ ID NO: 23572 - RNA, 20 nt, Artificial Sequence
  HTT spacer sequence GTCN PAM
aguguaggugagaaacuuua

SEQ ID NO: 23573 - RNA, 20 nt, Artificial Sequence
  HTT spacer sequence GTCN PAM
uuucauuucuauuauucaua

SEQ ID NO: 23574 - RNA, 20 nt, Artificial Sequence
  HTT spacer sequence GTCN PAM
cauggccaggcgugguggug

SEQ ID NO: 23575 - RNA, 20 nt, Artificial Sequence
  HTT spacer sequence GTCN PAM
cagcucacugcaaccucugc

SEQ ID NO: 23576 - RNA, 20 nt, Artificial Sequence
  HTT spacer sequence GTCN PAM
cccaggcuggagugcggugg

SEQ ID NO: 23577 - RNA, 20 nt, Artificial Sequence
  HTT spacer sequence GTCN PAM
ugcucugucacccaggcugg

SEQ ID NO: 23578 - RNA, 20 nt, Artificial Sequence
  HTT spacer sequence GTCN PAM
caugacaguagaagucuuga

SEQ ID NO: 23579 - RNA, 20 nt, Artificial Sequence
  HTT spacer sequence GTCN PAM
ugagacucucuuuuuuuuuu

SEQ ID NO: 23580 - RNA, 20 nt, Artificial Sequence
  HTT spacer sequence GTCN PAM
ugauccacgaucuuagcaaa

SEQ ID NO: 23581 - RNA, 20 nt, Artificial Sequence
  HTT spacer sequence GTCN PAM
cuccccagaagauggcaucc

SEQ ID NO: 23582 - RNA, 20 nt, Artificial Sequence
  HTT spacer sequence GTCN PAM
auccacacuccuggaacugu

SEQ ID NO: 23583 - RNA, 20 nt, Artificial Sequence
  HTT spacer sequence GTCN PAM
uugccauccgcacugcaaca

SEQ ID NO: 23584 - RNA, 20 nt, Artificial Sequence
  HTT spacer sequence GTCN PAM
uucucugauguucucagaag

SEQ ID NO: 23585 - RNA, 20 nt, Artificial Sequence
  HTT spacer sequence GTCN PAM
ucggguucuagaaugcaaag

SEQ ID NO: 23586 - RNA, 20 nt, Artificial Sequence
  HTT spacer sequence GTCN PAM
aacccuuugcauucuagaac

SEQ ID NO: 23587 - RNA, 20 nt, Artificial Sequence
  HTT spacer sequence GTCN PAM
uuuucaaugcauguuuuccg

SEQ ID NO: 23588 - RNA, 20 nt, Artificial Sequence
  HTT spacer sequence GTCN PAM
cccaggcuggagugcagcgg

SEQ ID NO: 23589 - RNA, 20 nt, Artificial Sequence
  HTT spacer sequence GTCN PAM
cgaaaugcagaacuuuuaau

SEQ ID NO: 23590 - RNA, 20 nt, Artificial Sequence
  HTT spacer sequence GTCN PAM
uuaaagcuuuuguuauuaaa

SEQ ID NO: 23591 - RNA, 20 nt, Artificial Sequence
  HTT spacer sequence GTCN PAM
uuccugaguccuuaaagcuu

SEQ ID NO: 23592 - RNA, 20 nt, Artificial Sequence
  HTT spacer sequence GTCN PAM
ugguucuccgugaguccaua

SEQ ID NO: 23593 - RNA, 20 nt, Artificial Sequence
  HTT spacer sequence GTCN PAM
auacuuaauuaacauuagac

SEQ ID NO: 23594 - RNA, 20 nt, Artificial Sequence
  HTT spacer sequence GTCN PAM
aauguuaauuaaguauggac

SEQ ID NO: 23595 - RNA, 20 nt, Artificial Sequence
  HTT spacer sequence GTCN PAM
ucuugaaucccaguugcuuc

SEQ ID NO: 23596 - RNA, 20 nt, Artificial Sequence
  HTT spacer sequence GTCN PAM
aauuaccugugauaacccau

SEQ ID NO: 23597 - RNA, 20 nt, Artificial Sequence
  HTT spacer sequence GTCN PAM
aagucaaauuaccugugaua

SEQ ID NO: 23598 - RNA, 20 nt, Artificial Sequence
  HTT spacer sequence GTCN PAM
gcugauuuaagaugaaaauc

SEQ ID NO: 23599 - RNA, 20 nt, Artificial Sequence
  HTT spacer sequence GTCN PAM
gucuuuucauuaaaguucca

SEQ ID NO: 23600 - RNA, 20 nt, Artificial Sequence
  HTT spacer sequence GTCN PAM
uuucauuaaaguuccaggaa

SEQ ID NO: 23601 - RNA, 20 nt, Artificial Sequence
  HTT spacer sequence GTCN PAM
uggaauacagguuucuaaua

SEQ ID NO: 23602 - RNA, 20 nt, Artificial Sequence
  HTT spacer sequence GTCN PAM
uuuucauccuuuuaugaauc

SEQ ID NO: 23603 - RNA, 20 nt, Artificial Sequence
  HTT spacer sequence GTCN PAM
uuuaggagauucauaaaagg

SEQ ID NO: 23604 - RNA, 20 nt, Artificial Sequence
  HTT spacer sequence GTCN PAM
uuuccacaguuaauugcuua

SEQ ID NO: 23605 - RNA, 20 nt, Artificial Sequence
  HTT spacer sequence GTCN PAM
uaguuaaaaacacaauugac

SEQ ID NO: 23606 - RNA, 20 nt, Artificial Sequence
  HTT spacer sequence GTCN PAM
auuguguuuuuaacuaugac

SEQ ID NO: 23607 - RNA, 20 nt, Artificial Sequence
  HTT spacer sequence GTCN PAM
augcuaucaauauaauuaug

SEQ ID NO: 23608 - RNA, 20 nt, Artificial Sequence
  HTT spacer sequence GTCN PAM
aaaaauaauguuuacuccuc

SEQ ID NO: 23609 - RNA, 20 nt, Artificial Sequence
  HTT spacer sequence GTCN PAM
gaaagacuauuuugaagcug

SEQ ID NO: 23610 - RNA, 20 nt, Artificial Sequence
  HTT spacer sequence GTCN PAM
uucugaccucuaacuuuggg

SEQ ID NO: 23611 - RNA, 20 nt, Artificial Sequence
  HTT spacer sequence GTCN PAM
aacugguuaagcauaacauc

SEQ ID NO: 23612 - RNA, 20 nt, Artificial Sequence
  HTT spacer sequence GTCN PAM
cuguacuccagccugggcaa

SEQ ID NO: 23613 - RNA, 20 nt, Artificial Sequence
  HTT spacer sequence GTCN PAM
cuacuaaaaauacaaaauua

SEQ ID NO: 23614 - RNA, 20 nt, Artificial Sequence
  HTT spacer sequence GTCN PAM
ggcuggucucgaacucccga

SEQ ID NO: 23615 - RNA, 20 nt, Artificial Sequence
  HTT spacer sequence GTCN PAM
cgaacucccgaccucaggug

SEQ ID NO: 23616 - RNA, 20 nt, Artificial Sequence
  HTT spacer sequence GTCN PAM
ggaguucgagaccagccuga

SEQ ID NO: 23617 - RNA, 20 nt, Artificial Sequence
  HTT spacer sequence GTCN PAM
cuagggcuacucagggaaag

SEQ ID NO: 23618 - RNA, 20 nt, Artificial Sequence
  HTT spacer sequence GTCN PAM
gauuucugaccucucucucu

SEQ ID NO: 23619 - RNA, 20 nt, Artificial Sequence
  HTT spacer sequence GTCN PAM
gaaaucugacugguaagaaa

SEQ ID NO: 23620 - RNA, 20 nt, Artificial Sequence
  HTT spacer sequence GTCN PAM
ucccgugcuguucugugaua

SEQ ID NO: 23621 - RNA, 20 nt, Artificial Sequence
  HTT spacer sequence GTCN PAM
guaacugcugcagaucccug

SEQ ID NO: 23622 - RNA, 20 nt, Artificial Sequence
  HTT spacer sequence GTCN PAM
ccaucuuguuuuaagucuuu

SEQ ID NO: 23623 - RNA, 20 nt, Artificial Sequence
  HTT spacer sequence GTCN PAM
uugggaguuugaccuuguaa

SEQ ID NO: 23624 - RNA, 20 nt, Artificial Sequence
  HTT spacer sequence GTCN PAM
aacucccaaagacuuaaaac

SEQ ID NO: 23625 - RNA, 20 nt, Artificial Sequence
  HTT spacer sequence GTCN PAM
ccaccuuccaaguggaacag

SEQ ID NO: 23626 - RNA, 20 nt, Artificial Sequence
  HTT spacer sequence GTCN PAM
uaguuagcucuacaaucuau

SEQ ID NO: 23627 - RNA, 20 nt, Artificial Sequence
  HTT spacer sequence GTCN PAM
agaguaguuaauuuucagcu

SEQ ID NO: 23628 - RNA, 20 nt, Artificial Sequence
  HTT spacer sequence GTCN PAM
ccauugcccuucccagaaag

SEQ ID NO: 23629 - RNA, 20 nt, Artificial Sequence
  HTT spacer sequence GTCN PAM
ugaauugccuuucucagagc

SEQ ID NO: 23630 - RNA, 20 nt, Artificial Sequence
  HTT spacer sequence GTCN PAM
gcuuaauuaaaaguagauau

SEQ ID NO: 23631 - RNA, 20 nt, Artificial Sequence
  HTT spacer sequence GTCN PAM
caggcuguuagagccagaau

SEQ ID NO: 23632 - RNA, 20 nt, Artificial Sequence
  HTT spacer sequence GTCN PAM
cuggcaccuccuguuuuccc

SEQ ID NO: 23633 - RNA, 20 nt, Artificial Sequence
  HTT spacer sequence GTCN PAM
cuaugugaaguaauuucuga

SEQ ID NO: 23634 - RNA, 20 nt, Artificial Sequence
  HTT spacer sequence GTCN PAM
aauggcaguuauggggcuga

SEQ ID NO: 23635 - RNA, 20 nt, Artificial Sequence
  HTT spacer sequence GTCN PAM
gccccauaacugccauuaga

SEQ ID NO: 23636 - RNA, 20 nt, Artificial Sequence
  HTT spacer sequence GTCN PAM
cguuuuuauaccagauccug

SEQ ID NO: 23637 - RNA, 20 nt, Artificial Sequence
  HTT spacer sequence GTCN PAM
cgaacuccugagcucaggca

SEQ ID NO: 23638 - RNA, 20 nt, Artificial Sequence
  HTT spacer sequence GTCN PAM
cagcuauuugggaggcugag

SEQ ID NO: 23639 - RNA, 20 nt, Artificial Sequence
  HTT spacer sequence GTCN PAM
ccaggcuggagugcaguggc

SEQ ID NO: 23640 - RNA, 20 nt, Artificial Sequence
  HTT spacer sequence GTCN PAM
ugcucugucaccaggcugga

SEQ ID NO: 23641 - RNA, 20 nt, Artificial Sequence
  HTT spacer sequence GTCN PAM
caaaaaaaaaaaagagaccc

SEQ ID NO: 23642 - RNA, 20 nt, Artificial Sequence
  HTT spacer sequence GTCN PAM
cuuuuuuuuuuuugagacgg

SEQ ID NO: 23643 - RNA, 20 nt, Artificial Sequence
  HTT spacer sequence GTCN PAM
uguucuuccaaggacuccau

SEQ ID NO: 23644 - RNA, 20 nt, Artificial Sequence
  HTT spacer sequence GTCN PAM
uuggaagaacaggaccagga

SEQ ID NO: 23645 - RNA, 20 nt, Artificial Sequence
  HTT spacer sequence GTCN PAM
gucuguguaguuauauaugu

SEQ ID NO: 23646 - RNA, 20 nt, Artificial Sequence
  HTT spacer sequence GTCN PAM
guguaguuauauauguguug

SEQ ID NO: 23647 - RNA, 20 nt, Artificial Sequence
  HTT spacer sequence GTCN PAM
ggaguucgagaccagccugg

SEQ ID NO: 23648 - RNA, 20 nt, Artificial Sequence
  HTT spacer sequence GTCN PAM
cgaacuccugaccucaggcg

SEQ ID NO: 23649 - RNA, 20 nt, Artificial Sequence
  HTT spacer sequence GTCN PAM
ccacuaaaaauacaaaaauu

SEQ ID NO: 23650 - RNA, 20 nt, Artificial Sequence
  HTT spacer sequence GTCN PAM
ggaugacagagugagacucu

SEQ ID NO: 23651 - RNA, 20 nt, Artificial Sequence
  HTT spacer sequence GTCN PAM
uccagacuugggugcagugg

SEQ ID NO: 23652 - RNA, 20 nt, Artificial Sequence
  HTT spacer sequence GTCN PAM
cacucugucauccagacuug

SEQ ID NO: 23653 - RNA, 20 nt, Artificial Sequence
  HTT spacer sequence GTCN PAM
caaaauaaaaauaaaaauaa

SEQ ID NO: 23654 - RNA, 20 nt, Artificial Sequence
  HTT spacer sequence GTCN PAM
uuauuuucaccaguaaccuu

SEQ ID NO: 23655 - RNA, 20 nt, Artificial Sequence
  HTT spacer sequence GTCN PAM
aauggcgugaucuaggcuca

SEQ ID NO: 23656 - RNA, 20 nt, Artificial Sequence
  HTT spacer sequence GTCN PAM
gccucucgggguucaagcaa

SEQ ID NO: 23657 - RNA, 20 nt, Artificial Sequence
  HTT spacer sequence GTCN PAM
ugaacuccugaccucaugau

SEQ ID NO: 23658 - RNA, 20 nt, Artificial Sequence
  HTT spacer sequence GTCN PAM
ggaguucaagaccagccugg

SEQ ID NO: 23659 - RNA, 20 nt, Artificial Sequence
  HTT spacer sequence GTCN PAM
uaaacugcuuugacuuuucu

SEQ ID NO: 23660 - RNA, 20 nt, Artificial Sequence
  HTT spacer sequence GTCN PAM
aagcaguuuaugaccuuaaa

SEQ ID NO: 23661 - RNA, 20 nt, Artificial Sequence
  HTT spacer sequence GTCN PAM
gcaggccuuaucuagaaucu

SEQ ID NO: 23662 - RNA, 20 nt, Artificial Sequence
  HTT spacer sequence GTCN PAM
uaaacacuccucuuuuuaaa

SEQ ID NO: 23663 - RNA, 20 nt, Artificial Sequence
  HTT spacer sequence GTCN PAM
aaccaugccauagauggccu

SEQ ID NO: 23664 - RNA, 20 nt, Artificial Sequence
  HTT spacer sequence GTCN PAM
auauguucacacacagaauu

SEQ ID NO: 23665 - RNA, 20 nt, Artificial Sequence
  HTT spacer sequence GTCN PAM
cgcucugucacccaggcugg

SEQ ID NO: 23666 - RNA, 20 nt, Artificial Sequence
  HTT spacer sequence GTCN PAM
cccaggcuggagugcagugg

SEQ ID NO: 23667 - RNA, 20 nt, Artificial Sequence
  HTT spacer sequence GTCN PAM
cuacuaaaaauacaaacauu

SEQ ID NO: 23668 - RNA, 20 nt, Artificial Sequence
  HTT spacer sequence GTCN PAM
ugaacuccugaccucgugau

SEQ ID NO: 23669 - RNA, 20 nt, Artificial Sequence
  HTT spacer sequence GTCN PAM
ggaguucaagaccagccugg

SEQ ID NO: 23670 - RNA, 20 nt, Artificial Sequence
  HTT spacer sequence GTCN PAM
ccacgccuggccaacagggu

SEQ ID NO: 23671 - RNA, 20 nt, Artificial Sequence
  HTT spacer sequence GTCN PAM
ggagaucgagaccauccggg

SEQ ID NO: 23672 - RNA, 20 nt, Artificial Sequence
  HTT spacer sequence GTCN PAM
cgaucuccugaccucgugau

SEQ ID NO: 23673 - RNA, 20 nt, Artificial Sequence
  HTT spacer sequence GTCN PAM
cagcuacucaggaggcugag

SEQ ID NO: 23674 - RNA, 20 nt, Artificial Sequence
  HTT spacer sequence GTCN PAM
cgcuguguugcccaggcugg

SEQ ID NO: 23675 - RNA, 20 nt, Artificial Sequence
  HTT spacer sequence GTCN PAM
aaaaaaaaaaaaagucucaa

SEQ ID NO: 23676 - RNA, 20 nt, Artificial Sequence
  HTT spacer sequence GTCN PAM
caaacuagcccuggguuggg

SEQ ID NO: 23677 - RNA, 20 nt, Artificial Sequence
  HTT spacer sequence GTCN PAM
ucuuuaacccauuuuuaacc

SEQ ID NO: 23678 - RNA, 20 nt, Artificial Sequence
  HTT spacer sequence GTCN PAM
cucuggguuaaaaauggguu

SEQ ID NO: 23679 - RNA, 20 nt, Artificial Sequence
  HTT spacer sequence GTCN PAM
gccaauuugugcugcagccu

SEQ ID NO: 23680 - RNA, 20 nt, Artificial Sequence
  HTT spacer sequence GTCN PAM
gugcacuguuguucauucag

SEQ ID NO: 23681 - RNA, 20 nt, Artificial Sequence
  HTT spacer sequence GTCN PAM
ucuuuaguaagauuucacca

SEQ ID NO: 23682 - RNA, 20 nt, Artificial Sequence
  HTT spacer sequence GTCN PAM
uacagaaauggugaaaucuu

SEQ ID NO: 23683 - RNA, 20 nt, Artificial Sequence
  HTT spacer sequence GTCN PAM
gaaagaaacugguagaaaau

SEQ ID NO: 23684 - RNA, 20 nt, Artificial Sequence
  HTT spacer sequence GTCN PAM
gauguaagaggccucuaacu

SEQ ID NO: 23685 - RNA, 20 nt, Artificial Sequence
  HTT spacer sequence GTCN PAM
aggaauagauuugauacggu

SEQ ID NO: 23686 - RNA, 20 nt, Artificial Sequence
  HTT spacer sequence GTCN PAM
ccaaagaaaauggauggguc

SEQ ID NO: 23687 - RNA, 20 nt, Artificial Sequence
  HTT spacer sequence GTCN PAM
ucucuuggauuuuggagauc

SEQ ID NO: 23688 - RNA, 20 nt, Artificial Sequence
  HTT spacer sequence GTCN PAM
auugauuucucagagcagcu

SEQ ID NO: 23689 - RNA, 20 nt, Artificial Sequence
  HTT spacer sequence GTCN PAM
agcagguaccuuacuuguuc

SEQ ID NO: 23690 - RNA, 20 nt, Artificial Sequence
  HTT spacer sequence GTCN PAM
uuagaagcuuuacuuuggau

SEQ ID NO: 23691 - RNA, 20 nt, Artificial Sequence
  HTT spacer sequence GTCN PAM
gaagugggauccaaaguaaa

SEQ ID NO: 23692 - RNA, 20 nt, Artificial Sequence
  HTT spacer sequence GTCN PAM
ucagaaucccagcagauuca

SEQ ID NO: 23693 - RNA, 20 nt, Artificial Sequence
  HTT spacer sequence GTCN PAM
cucugaaucugcugggauuc

SEQ ID NO: 23694 - RNA, 20 nt, Artificial Sequence
  HTT spacer sequence GTCN PAM
gaacaaauuuacagacaaaa

SEQ ID NO: 23695 - RNA, 20 nt, Artificial Sequence
  HTT spacer sequence GTCN PAM
guaaauuuguucugaccaug

SEQ ID NO: 23696 - RNA, 20 nt, Artificial Sequence
  HTT spacer sequence GTCN PAM
cuucccguuuuuugucugua

SEQ ID NO: 23697 - RNA, 20 nt, Artificial Sequence
  HTT spacer sequence GTCN PAM
uugccaaucccagcagccau

SEQ ID NO: 23698 - RNA, 20 nt, Artificial Sequence
  HTT spacer sequence GTCN PAM
accuauaaguuagguuguag

SEQ ID NO: 23699 - RNA, 20 nt, Artificial Sequence
  HTT spacer sequence GTCN PAM
uuguggaugaacuacaaccu

SEQ ID NO: 23700 - RNA, 20 nt, Artificial Sequence
  HTT spacer sequence GTCN PAM
uucucaggccauauuuaguu

SEQ ID NO: 23701 - RNA, 20 nt, Artificial Sequence
  HTT spacer sequence GTCN PAM
uauagguguaaaagcaaacu

SEQ ID NO: 23702 - RNA, 20 nt, Artificial Sequence
  HTT spacer sequence GTCN PAM
uacagucacccccaccaucu

SEQ ID NO: 23703 - RNA, 20 nt, Artificial Sequence
  HTT spacer sequence GTCN PAM
cccccaccaucuaucauuca

SEQ ID NO: 23704 - RNA, 20 nt, Artificial Sequence
  HTT spacer sequence GTCN PAM
ccaugaaacacuaauuccac

SEQ ID NO: 23705 - RNA, 20 nt, Artificial Sequence
  HTT spacer sequence GTCN PAM
aauucauaaaaacagagggc

SEQ ID NO: 23706 - RNA, 20 nt, Artificial Sequence
  HTT spacer sequence GTCN PAM
caguggaaucagacagcauu

SEQ ID NO: 23707 - RNA, 20 nt, Artificial Sequence
  HTT spacer sequence GTCN PAM
gauuccacugagacaggaga

SEQ ID NO: 23708 - RNA, 20 nt, Artificial Sequence
  HTT spacer sequence GTCN PAM
caaggggcaaaugcugucug

SEQ ID NO: 23709 - RNA, 20 nt, Artificial Sequence
  HTT spacer sequence GTCN PAM
cgcucugucgcccaggcugg

SEQ ID NO: 23710 - RNA, 20 nt, Artificial Sequence
  HTT spacer sequence GTCN PAM
cccaggcuggagugcagugg

SEQ ID NO: 23711 - RNA, 20 nt, Artificial Sequence
  HTT spacer sequence GTCN PAM
cagccucccgaguagcuggg

SEQ ID NO: 23712 - RNA, 20 nt, Artificial Sequence
  HTT spacer sequence GTCN PAM
cagcuacucgggaggcugag

SEQ ID NO: 23713 - RNA, 20 nt, Artificial Sequence
  HTT spacer sequence GTCN PAM
cuacuaaagauacaaaaaau

SEQ ID NO: 23714 - RNA, 20 nt, Artificial Sequence
  HTT spacer sequence GTCN PAM
ucaucuccugaccucgugau

SEQ ID NO: 23715 - RNA, 20 nt, Artificial Sequence
  HTT spacer sequence GTCN PAM
ggagaugaagaccauccugg

SEQ ID NO: 23716 - RNA, 20 nt, Artificial Sequence
  HTT spacer sequence GTCN PAM
caggguggggugcaguggcu

SEQ ID NO: 23717 - RNA, 20 nt, Artificial Sequence
  HTT spacer sequence GTCN PAM
uuaugcuaagugaaaaagcc

SEQ ID NO: 23718 - RNA, 20 nt, Artificial Sequence
  HTT spacer sequence GTCN PAM
gaauuucccuccuauuuaag

SEQ ID NO: 23719 - RNA, 20 nt, Artificial Sequence
  HTT spacer sequence GTCN PAM
caaugcugaccccaagagag

SEQ ID NO: 23720 - RNA, 20 nt, Artificial Sequence
  HTT spacer sequence GTCN PAM
gcauugggaccccuuuccag

SEQ ID NO: 23721 - RNA, 20 nt, Artificial Sequence
  HTT spacer sequence GTCN PAM
gaauucuuucuugagcaaga

SEQ ID NO: 23722 - RNA, 20 nt, Artificial Sequence
  HTT spacer sequence GTCN PAM
acagaauaaaaugaaaguaa

SEQ ID NO: 23723 - RNA, 20 nt, Artificial Sequence
  HTT spacer sequence GTCN PAM
caaaaauaaauaaauaaaua

SEQ ID NO: 23724 - RNA, 20 nt, Artificial Sequence
  HTT spacer sequence GTCN PAM
cccuuuguugcccaggcugg

SEQ ID NO: 23725 - RNA, 20 nt, Artificial Sequence
  HTT spacer sequence GTCN PAM
cagcuacucaggaggcugag

SEQ ID NO: 23726 - RNA, 20 nt, Artificial Sequence
  HTT spacer sequence GTCN PAM
cuacuaaaaauacaaaaaau

SEQ ID NO: 23727 - RNA, 20 nt, Artificial Sequence
  HTT spacer sequence GTCN PAM
caaucuccugaccuugugau

SEQ ID NO: 23728 - RNA, 20 nt, Artificial Sequence
  HTT spacer sequence GTCN PAM
ggagauugagaccauccugg

SEQ ID NO: 23729 - RNA, 20 nt, Artificial Sequence
  HTT spacer sequence GTCN PAM
ucugcccgccuuggccuccc

SEQ ID NO: 23730 - RNA, 20 nt, Artificial Sequence
  HTT spacer sequence GTCN PAM
ggaguuugagaccagcuuga

SEQ ID NO: 23731 - RNA, 20 nt, Artificial Sequence
  HTT spacer sequence GTCN PAM
caaacuccugaccucagguc

SEQ ID NO: 23732 - RNA, 20 nt, Artificial Sequence
  HTT spacer sequence GTCN PAM
agcuggucucaaacuccuga

SEQ ID NO: 23733 - RNA, 20 nt, Artificial Sequence
  HTT spacer sequence GTCN PAM
caaaagaaaaaaaaaaaaua

SEQ ID NO: 23734 - RNA, 20 nt, Artificial Sequence
  HTT spacer sequence GTCN PAM
uggggcuggugggagugccu

SEQ ID NO: 23735 - RNA, 20 nt, Artificial Sequence
  HTT spacer sequence GTCN PAM
uugugaccuguaucuugugu

SEQ ID NO: 23736 - RNA, 20 nt, Artificial Sequence
  HTT spacer sequence GTCN PAM
caaagaccuuacugauaaaa

SEQ ID NO: 23737 - RNA, 20 nt, Artificial Sequence
  HTT spacer sequence GTCN PAM
gccuccuaccucauccugug

SEQ ID NO: 23738 - RNA, 20 nt, Artificial Sequence
  HTT spacer sequence GTCN PAM
caggaugagguaggaggcug

SEQ ID NO: 23739 - RNA, 20 nt, Artificial Sequence
  HTT spacer sequence GTCN PAM
gccucauuuuaccccgcccc

SEQ ID NO: 23740 - RNA, 20 nt, Artificial Sequence
  HTT spacer sequence GTCN PAM
gaggcguuggaaccagaaca

SEQ ID NO: 23741 - RNA, 20 nt, Artificial Sequence
  HTT spacer sequence GTCN PAM
ugcucugucacccaggcugg

SEQ ID NO: 23742 - RNA, 20 nt, Artificial Sequence
  HTT spacer sequence GTCN PAM
cccaggcuggagugcugugg

SEQ ID NO: 23743 - RNA, 20 nt, Artificial Sequence
  HTT spacer sequence GTCN PAM
cagcuacucgggaggcugag

SEQ ID NO: 23744 - RNA, 20 nt, Artificial Sequence
  HTT spacer sequence GTCN PAM
uugcagaugaaucguaaccu

SEQ ID NO: 23745 - RNA, 20 nt, Artificial Sequence
  HTT spacer sequence GTCN PAM
gccuaccuacuaugcuaggu

SEQ ID NO: 23746 - RNA, 20 nt, Artificial Sequence
  HTT spacer sequence GTCN PAM
cagccaguuccugcagccag

SEQ ID NO: 23747 - RNA, 20 nt, Artificial Sequence
  HTT spacer sequence GTCN PAM
ggcugcaggaacuggcugag

SEQ ID NO: 23748 - RNA, 20 nt, Artificial Sequence
  HTT spacer sequence GTCN PAM
auaaauuugcuuugaccaca

SEQ ID NO: 23749 - RNA, 20 nt, Artificial Sequence
  HTT spacer sequence GTCN PAM
aagcaaauuuauggacagaa

SEQ ID NO: 23750 - RNA, 20 nt, Artificial Sequence
  HTT spacer sequence GTCN PAM
cccugaaucugcugugauuc

SEQ ID NO: 23751 - RNA, 20 nt, Artificial Sequence
  HTT spacer sequence GTCN PAM
cagaaucacagcagauucag

SEQ ID NO: 23752 - RNA, 20 nt, Artificial Sequence
  HTT spacer sequence GTCN PAM
uuuuaaauggcuuuucagua

SEQ ID NO: 23753 - RNA, 20 nt, Artificial Sequence
  HTT spacer sequence GTCN PAM
aaaaauagaaaauugguaga

SEQ ID NO: 23754 - RNA, 20 nt, Artificial Sequence
  HTT spacer sequence GTCN PAM
caaaaaaagaaaaaaaaaau

SEQ ID NO: 23755 - RNA, 20 nt, Artificial Sequence
  HTT spacer sequence GTCN PAM
cgcuccgucacccaggcugg

SEQ ID NO: 23756 - RNA, 20 nt, Artificial Sequence
  HTT spacer sequence GTCN PAM
cccaggcuggagugcagugg

SEQ ID NO: 23757 - RNA, 20 nt, Artificial Sequence
  HTT spacer sequence GTCN PAM
ggcuggucucaaacuccuga

SEQ ID NO: 23758 - RNA, 20 nt, Artificial Sequence
  HTT spacer sequence GTCN PAM
caaacuccugaccucaggug

SEQ ID NO: 23759 - RNA, 20 nt, Artificial Sequence
  HTT spacer sequence GTCN PAM
ggaguuugagaccagccuga

SEQ ID NO: 23760 - RNA, 20 nt, Artificial Sequence
  HTT spacer sequence GTCN PAM
accugccuuggccucccaaa

SEQ ID NO: 23761 - RNA, 20 nt, Artificial Sequence
  HTT spacer sequence GTCN PAM
cuguguuuuuuguuuuuuuu

SEQ ID NO: 23762 - RNA, 20 nt, Artificial Sequence
  HTT spacer sequence GTCN PAM
caaaaaaaaaaacaaaaaac

SEQ ID NO: 23763 - RNA, 20 nt, Artificial Sequence
  HTT spacer sequence GTCN PAM
cauucauucugucacccagg

SEQ ID NO: 23764 - RNA, 20 nt, Artificial Sequence
  HTT spacer sequence GTCN PAM
cccaggcuggaguucagugg

SEQ ID NO: 23765 - RNA, 20 nt, Artificial Sequence
  HTT spacer sequence GTCN PAM
ccuggguuccagugauucuc

SEQ ID NO: 23766 - RNA, 20 nt, Artificial Sequence
  HTT spacer sequence GTCN PAM
gucuccugaguagcuguguu

SEQ ID NO: 23767 - RNA, 20 nt, Artificial Sequence
  HTT spacer sequence GTCN PAM
ccugaguagcuguguuccug

SEQ ID NO: 23768 - RNA, 20 nt, Artificial Sequence
  HTT spacer sequence GTCN PAM
uucgaugguuauuuaauacu

SEQ ID NO: 23769 - RNA, 20 nt, Artificial Sequence
  HTT spacer sequence GTCN PAM
uucaaaagauuuaacugugc

SEQ ID NO: 23770 - RNA, 20 nt, Artificial Sequence
  HTT spacer sequence GTCN PAM
cucuucagaaaagugauagg

SEQ ID NO: 23771 - RNA, 20 nt, Artificial Sequence
  HTT spacer sequence GTCN PAM
uagcaauuuuaagaaguccu

SEQ ID NO: 23772 - RNA, 20 nt, Artificial Sequence
  HTT spacer sequence GTCN PAM
ucauuucuacauuuccuuac

SEQ ID NO: 23773 - RNA, 20 nt, Artificial Sequence
  HTT spacer sequence GTCN PAM
cuucaaucuuuccucacacu

SEQ ID NO: 23774 - RNA, 20 nt, Artificial Sequence
  HTT spacer sequence GTCN PAM
acuacauuuacacauuuuaa

SEQ ID NO: 23775 - RNA, 20 nt, Artificial Sequence
  HTT spacer sequence GTCN PAM
cauuuaauuuagaaaguuua

SEQ ID NO: 23776 - RNA, 20 nt, Artificial Sequence
  HTT spacer sequence GTCN PAM
ucgguaagguuuucuuuuca

SEQ ID NO: 23777 - RNA, 20 nt, Artificial Sequence
  HTT spacer sequence GTCN PAM
gcagcucgauuuuacaggcu

SEQ ID NO: 23778 - RNA, 20 nt, Artificial Sequence
  HTT spacer sequence GTCN PAM
accaugugcacaguaaggag

SEQ ID NO: 23779 - RNA, 20 nt, Artificial Sequence
  HTT spacer sequence GTCN PAM
cccgaguagagaccaauuug

SEQ ID NO: 23780 - RNA, 20 nt, Artificial Sequence
  HTT spacer sequence GTCN PAM
cuacucgggggacacuaugu

SEQ ID NO: 23781 - RNA, 20 nt, Artificial Sequence
  HTT spacer sequence GTCN PAM
aaccaaucuuugggcccugu

SEQ ID NO: 23782 - RNA, 20 nt, Artificial Sequence
  HTT spacer sequence GTCN PAM
aauuuacacagggcccaaag

SEQ ID NO: 23783 - RNA, 20 nt, Artificial Sequence
  HTT spacer sequence GTCN PAM
auaaaacccuguccauucug

SEQ ID NO: 23784 - RNA, 20 nt, Artificial Sequence
  HTT spacer sequence GTCN PAM
auucugccgcaggcuggaag

SEQ ID NO: 23785 - RNA, 20 nt, Artificial Sequence
  HTT spacer sequence GTCN PAM
uccagccugcggcagaaugg

SEQ ID NO: 23786 - RNA, 20 nt, Artificial Sequence
  HTT spacer sequence GTCN PAM
ccuauagagagagaggggug

SEQ ID NO: 23787 - RNA, 20 nt, Artificial Sequence
  HTT spacer sequence GTCN PAM
cugaaguggcauaauaccca

SEQ ID NO: 23788 - RNA, 20 nt, Artificial Sequence
  HTT spacer sequence GTCN PAM
ucaggauuuccugaggcugu

SEQ ID NO: 23789 - RNA, 20 nt, Artificial Sequence
  HTT spacer sequence GTCN PAM
gggcacagcuugguuuuaua

SEQ ID NO: 23790 - RNA, 20 nt, Artificial Sequence
  HTT spacer sequence GTCN PAM
cccuaaaauguauaaaacca

SEQ ID NO: 23791 - RNA, 20 nt, Artificial Sequence
  HTT spacer sequence GTCN PAM
caugucucccuaaaauguau

SEQ ID NO: 23792 - RNA, 20 nt, Artificial Sequence
  HTT spacer sequence GTCN PAM
auucauauauguaagaagua

SEQ ID NO: 23793 - RNA, 20 nt, Artificial Sequence
  HTT spacer sequence GTCN PAM
agaaaggcggggacaacuug

SEQ ID NO: 23794 - RNA, 20 nt, Artificial Sequence
  HTT spacer sequence GTCN PAM
ccgccuuucuggacggaacc

SEQ ID NO: 23795 - RNA, 20 nt, Artificial Sequence
  HTT spacer sequence GTCN PAM
cagguagacaaaugguugca

SEQ ID NO: 23796 - RNA, 20 nt, Artificial Sequence
  HTT spacer sequence GTCN PAM
accugugaccuagaagcucu

SEQ ID NO: 23797 - RNA, 20 nt, Artificial Sequence
  HTT spacer sequence GTCN PAM
auugacugggcgcaguggcu

SEQ ID NO: 23798 - RNA, 20 nt, Artificial Sequence
  HTT spacer sequence GTCN PAM
auagacgcauauucugauug

SEQ ID NO: 23799 - RNA, 20 nt, Artificial Sequence
  HTT spacer sequence GTCN PAM
ggaguuugagagcagcccgg

SEQ ID NO: 23800 - RNA, 20 nt, Artificial Sequence
  HTT spacer sequence GTCN PAM
cuacuaaaaauacaaaaaau

SEQ ID NO: 23801 - RNA, 20 nt, Artificial Sequence
  HTT spacer sequence GTCN PAM
caaagucaggagauugagac

SEQ ID NO: 23802 - RNA, 20 nt, Artificial Sequence
  HTT spacer sequence GTCN PAM
ggagauugagaccauccugg

SEQ ID NO: 23803 - RNA, 20 nt, Artificial Sequence
  HTT spacer sequence GTCN PAM
caaucuccugacuuugugac

SEQ ID NO: 23804 - RNA, 20 nt, Artificial Sequence
  HTT spacer sequence GTCN PAM
cagcuacucggcaggcugag

SEQ ID NO: 23805 - RNA, 20 nt, Artificial Sequence
  HTT spacer sequence GTCN PAM
gggcuggagugcaguggugu

SEQ ID NO: 23806 - RNA, 20 nt, Artificial Sequence
  HTT spacer sequence GTCN PAM
uccgggcuggagugcagugg

SEQ ID NO: 23807 - RNA, 20 nt, Artificial Sequence
  HTT spacer sequence GTCN PAM
ugcccugucguccgggcugg

SEQ ID NO: 23808 - RNA, 20 nt, Artificial Sequence
  HTT spacer sequence GTCN PAM
uccuucugcucacugagaua

SEQ ID NO: 23809 - RNA, 20 nt, Artificial Sequence
  HTT spacer sequence GTCN PAM
cagcuacuugggaggcugag

SEQ ID NO: 23810 - RNA, 20 nt, Artificial Sequence
  HTT spacer sequence GTCN PAM
cacuauguguccaggcuggu

SEQ ID NO: 23811 - RNA, 20 nt, Artificial Sequence
  HTT spacer sequence GTCN PAM
aggcuggucuaaaaccccug

SEQ ID NO: 23812 - RNA, 20 nt, Artificial Sequence
  HTT spacer sequence GTCN PAM
aaaaccccugagcucaaaug

SEQ ID NO: 23813 - RNA, 20 nt, Artificial Sequence
  HTT spacer sequence GTCN PAM
ucccgccucagccucccgaa

SEQ ID NO: 23814 - RNA, 20 nt, Artificial Sequence
  HTT spacer sequence GTCN PAM
acauuuuuauaaauugcuaa

SEQ ID NO: 23815 - RNA, 20 nt, Artificial Sequence
  HTT spacer sequence GTCN PAM
ggugugagcccggacuucga

SEQ ID NO: 23816 - RNA, 20 nt, Artificial Sequence
  HTT spacer sequence GTCN PAM
gggcucacaccagaccucca

SEQ ID NO: 23817 - RNA, 20 nt, Artificial Sequence
  HTT spacer sequence GTCN PAM
aacaccuccccucugcggcc

SEQ ID NO: 23818 - RNA, 20 nt, Artificial Sequence
  HTT spacer sequence GTCN PAM
aggcggugaagcacaggccg

SEQ ID NO: 23819 - RNA, 20 nt, Artificial Sequence
  HTT spacer sequence GTCN PAM
cccuucggcucauucucgaa

SEQ ID NO: 23820 - RNA, 20 nt, Artificial Sequence
  HTT spacer sequence GTCN PAM
caaacuucacuucuccugug

SEQ ID NO: 23821 - RNA, 20 nt, Artificial Sequence
  HTT spacer sequence GTCN PAM
aagguccuggccccuuucuc

SEQ ID NO: 23822 - RNA, 20 nt, Artificial Sequence
  HTT spacer sequence GTCN PAM
uggccccuuucucuucugcu

SEQ ID NO: 23823 - RNA, 20 nt, Artificial Sequence
  HTT spacer sequence GTCN PAM
agagaaccgcacuuacccuc

SEQ ID NO: 23824 - RNA, 20 nt, Artificial Sequence
  HTT spacer sequence GTCN PAM
guucuaaugauaaagcagag

SEQ ID NO: 23825 - RNA, 20 nt, Artificial Sequence
  HTT spacer sequence GTCN PAM
ugggaaaccgcaagagucug

SEQ ID NO: 23826 - RNA, 20 nt, Artificial Sequence
  HTT spacer sequence GTCN PAM
agcagaagcacagcccacau

SEQ ID NO: 23827 - RNA, 20 nt, Artificial Sequence
  HTT spacer sequence GTCN PAM
uuccugagcaagaacucuaa

SEQ ID NO: 23828 - RNA, 20 nt, Artificial Sequence
  HTT spacer sequence GTCN PAM
caguccaaccggaccuuuua

SEQ ID NO: 23829 - RNA, 20 nt, Artificial Sequence
  HTT spacer sequence GTCN PAM
aaccggaccuuuuacuaaag

SEQ ID NO: 23830 - RNA, 20 nt, Artificial Sequence
  HTT spacer sequence GTCN PAM
gguuggacugggacauaggu

SEQ ID NO: 23831 - RNA, 20 nt, Artificial Sequence
  HTT spacer sequence GTCN PAM
ucccugggguuggagccuuu

SEQ ID NO: 23832 - RNA, 20 nt, Artificial Sequence
  HTT spacer sequence GTCN PAM
gagacacgacguagccuuca

SEQ ID NO: 23833 - RNA, 20 nt, Artificial Sequence
  HTT spacer sequence GTCN PAM
ccgacccccuacuaaaggcu

SEQ ID NO: 23834 - RNA, 20 nt, Artificial Sequence
  HTT spacer sequence GTCN PAM
ugucuccgacccccuacuaa

SEQ ID NO: 23835 - RNA, 20 nt, Artificial Sequence
  HTT spacer sequence GTCN PAM
ugaaggcuacgucgugucuc

SEQ ID NO: 23836 - RNA, 20 nt, Artificial Sequence
  HTT spacer sequence GTCN PAM
aguuacacgaucccuguaag

SEQ ID NO: 23837 - RNA, 20 nt, Artificial Sequence
  HTT spacer sequence GTCN PAM
guugaaguaagugcuacaaa

SEQ ID NO: 23838 - RNA, 20 nt, Artificial Sequence
  HTT spacer sequence GTCN PAM
cgagggaaagaaagucagcg

SEQ ID NO: 23839 - RNA, 20 nt, Artificial Sequence
  HTT spacer sequence GTCN PAM
gcguggcuugggaguuggga

SEQ ID NO: 23840 - RNA, 20 nt, Artificial Sequence
  HTT spacer sequence GTCN PAM
ugcugcucccaacucccaag

SEQ ID NO: 23841 - RNA, 20 nt, Artificial Sequence
  HTT spacer sequence GTCN PAM
uaagauaucuugagccacug

SEQ ID NO: 23842 - RNA, 20 nt, Artificial Sequence
  HTT spacer sequence GTCN PAM
uacaagaaccaggcagcccu

SEQ ID NO: 23843 - RNA, 20 nt, Artificial Sequence
  HTT spacer sequence GTCN PAM
uccuacaagaaccaggcagc

SEQ ID NO: 23844 - RNA, 20 nt, Artificial Sequence
  HTT spacer sequence GTCN PAM
gucuaucugucaguggcaga

SEQ ID NO: 23845 - RNA, 20 nt, Artificial Sequence
  HTT spacer sequence GTCN PAM
aucugucaguggcagagcca

SEQ ID NO: 23846 - RNA, 20 nt, Artificial Sequence
  HTT spacer sequence GTCN PAM
guggcagagccagccuugga

SEQ ID NO: 23847 - RNA, 20 nt, Artificial Sequence
  HTT spacer sequence GTCN PAM
cugcacuggccaggcaugca

SEQ ID NO: 23848 - RNA, 20 nt, Artificial Sequence
  HTT spacer sequence GTCN PAM
agugcuacugaacagaaugu

SEQ ID NO: 23849 - RNA, 20 nt, Artificial Sequence
  HTT spacer sequence GTCN PAM
caucuagauggggccuucug

SEQ ID NO: 23850 - RNA, 20 nt, Artificial Sequence
  HTT spacer sequence GTCN PAM
ugccccaccagcucugucuc

SEQ ID NO: 23851 - RNA, 20 nt, Artificial Sequence
  HTT spacer sequence GTCN PAM
uuguccugccccaccagcuc

SEQ ID NO: 23852 - RNA, 20 nt, Artificial Sequence
  HTT spacer sequence GTCN PAM
caagaagcccccucucucca

SEQ ID NO: 23853 - RNA, 20 nt, Artificial Sequence
  HTT spacer sequence GTCN PAM
ccugggagggaugaggccac

SEQ ID NO: 23854 - RNA, 20 nt, Artificial Sequence
  HTT spacer sequence GTCN PAM
cuaauucuuucuugcagcag

SEQ ID NO: 23855 - RNA, 20 nt, Artificial Sequence
  HTT spacer sequence GTCN PAM
ugaacucuuggccucaagca

SEQ ID NO: 23856 - RNA, 20 nt, Artificial Sequence
  HTT spacer sequence GTCN PAM
auaaucccagcgcuugggga

SEQ ID NO: 23857 - RNA, 20 nt, Artificial Sequence
  HTT spacer sequence GTCN PAM
gcacccaguuccugccacag

SEQ ID NO: 23858 - RNA, 20 nt, Artificial Sequence
  HTT spacer sequence GTCN PAM
ccucauuagaacaaaagaug

SEQ ID NO: 23859 - RNA, 20 nt, Artificial Sequence
  HTT spacer sequence GTCN PAM
caacugcucaggaggcugag

SEQ ID NO: 23860 - RNA, 20 nt, Artificial Sequence
  HTT spacer sequence GTCN PAM
cugcuaaaaauacaaaaauu

SEQ ID NO: 23861 - RNA, 20 nt, Artificial Sequence
  HTT spacer sequence GTCN PAM
uuuggccaggcacgguggcu

SEQ ID NO: 23862 - RNA, 20 nt, Artificial Sequence
  HTT spacer sequence GTCN PAM
aagugcuacccuucaaaaaa

SEQ ID NO: 23863 - RNA, 20 nt, Artificial Sequence
  HTT spacer sequence GTCN PAM
gauuguuugagccugguguu

SEQ ID NO: 23864 - RNA, 20 nt, Artificial Sequence
  HTT spacer sequence GTCN PAM
ggaauauuucaagcccauuc

SEQ ID NO: 23865 - RNA, 20 nt, Artificial Sequence
  HTT spacer sequence GTCN PAM
uuauaagauuuugguaucaa

SEQ ID NO: 23866 - RNA, 20 nt, Artificial Sequence
  HTT spacer sequence GTCN PAM
gguaauacuuuauuaagggu

SEQ ID NO: 23867 - RNA, 20 nt, Artificial Sequence
  HTT spacer sequence GTCN PAM
caucauaacauagugggguu

SEQ ID NO: 23868 - RNA, 20 nt, Artificial Sequence
  HTT spacer sequence GTCN PAM
aaugccuuuacagcaucuau

SEQ ID NO: 23869 - RNA, 20 nt, Artificial Sequence
  HTT spacer sequence GTCN PAM
auaaaauaaauuaguuacuc

SEQ ID NO: 23870 - RNA, 20 nt, Artificial Sequence
  HTT spacer sequence GTCN PAM
caaaaaaaaaaaagaagaaa

SEQ ID NO: 23871 - RNA, 20 nt, Artificial Sequence
  HTT spacer sequence GTCN PAM
ugcucuguugccaggcugga

SEQ ID NO: 23872 - RNA, 20 nt, Artificial Sequence
  HTT spacer sequence GTCN PAM
cagcuacucgggaggcugag

SEQ ID NO: 23873 - RNA, 20 nt, Artificial Sequence
  HTT spacer sequence GTCN PAM
ggcuggucuugaacucccaa

SEQ ID NO: 23874 - RNA, 20 nt, Artificial Sequence
  HTT spacer sequence GTCN PAM
ugaacucccaaccucacgua

SEQ ID NO: 23875 - RNA, 20 nt, Artificial Sequence
  HTT spacer sequence GTCN PAM
auaagcaucaguauuaagga

SEQ ID NO: 23876 - RNA, 20 nt, Artificial Sequence
  HTT spacer sequence GTCN PAM
gagcauagcuaaggcaggcu

SEQ ID NO: 23877 - RNA, 20 nt, Artificial Sequence
  HTT spacer sequence GTCN PAM
gugucugagcauagcuaagg

SEQ ID NO: 23878 - RNA, 20 nt, Artificial Sequence
  HTT spacer sequence GTCN PAM
gccuacaauuggcaaaauca

SEQ ID NO: 23879 - RNA, 20 nt, Artificial Sequence
  HTT spacer sequence GTCN PAM
acugcagagcaucugcuguu

SEQ ID NO: 23880 - RNA, 20 nt, Artificial Sequence
  HTT spacer sequence GTCN PAM
caagggcaaacagcagaugc

SEQ ID NO: 23881 - RNA, 20 nt, Artificial Sequence
  HTT spacer sequence GTCN PAM
ugugaagcugggaagcuccc

SEQ ID NO: 23882 - RNA, 20 nt, Artificial Sequence
  HTT spacer sequence GTCN PAM
aaaaauuuuaguugaaccag

SEQ ID NO: 23883 - RNA, 20 nt, Artificial Sequence
  HTT spacer sequence GTCN PAM
caaacuuaggcugguucaac

SEQ ID NO: 23884 - RNA, 20 nt, Artificial Sequence
  HTT spacer sequence GTCN PAM
ucaauguacauggaaguucc

SEQ ID NO: 23885 - RNA, 20 nt, Artificial Sequence
  HTT spacer sequence GTCN PAM
gucaucaauguacauggaag

SEQ ID NO: 23886 - RNA, 20 nt, Artificial Sequence
  HTT spacer sequence GTCN PAM
ggauuuauucauuauguuca

SEQ ID NO: 23887 - RNA, 20 nt, Artificial Sequence
  HTT spacer sequence GTCN PAM
agaucagcaaauacccgcaa

SEQ ID NO: 23888 - RNA, 20 nt, Artificial Sequence
  HTT spacer sequence GTCN PAM
cacucuguugccaggcugga

SEQ ID NO: 23889 - RNA, 20 nt, Artificial Sequence
  HTT spacer sequence GTCN PAM
cuacuaaaauuacaaaaauc

SEQ ID NO: 23890 - RNA, 20 nt, Artificial Sequence
  HTT spacer sequence GTCN PAM
cgaucucuugacgucaugau

SEQ ID NO: 23891 - RNA, 20 nt, Artificial Sequence
  HTT spacer sequence GTCN PAM
agagaucgagaccauccugg

SEQ ID NO: 23892 - RNA, 20 nt, Artificial Sequence
  HTT spacer sequence GTCN PAM
ugaucuguccaccucggccu

SEQ ID NO: 23893 - RNA, 20 nt, Artificial Sequence
  HTT spacer sequence GTCN PAM
accucggccucccaaagugc

SEQ ID NO: 23894 - RNA, 20 nt, Artificial Sequence
  HTT spacer sequence GTCN PAM
cgccuauaaucccagcacuu

SEQ ID NO: 23895 - RNA, 20 nt, Artificial Sequence
  HTT spacer sequence GTCN PAM
gagcuaagccucuugagcau

SEQ ID NO: 23896 - RNA, 20 nt, Artificial Sequence
  HTT spacer sequence GTCN PAM
ccuaugcucaagaggcuuag

SEQ ID NO: 23897 - RNA, 20 nt, Artificial Sequence
  HTT spacer sequence GTCN PAM
caggcaauuccuuuccacuu

SEQ ID NO: 23898 - RNA, 20 nt, Artificial Sequence
  HTT spacer sequence GTCN PAM
acuuugggguccaccccacc

SEQ ID NO: 23899 - RNA, 20 nt, Artificial Sequence
  HTT spacer sequence GTCN PAM
accccacccaagaagaagga

SEQ ID NO: 23900 - RNA, 20 nt, Artificial Sequence
  HTT spacer sequence GTCN PAM
uccuucuucuuggguggggu

SEQ ID NO: 23901 - RNA, 20 nt, Artificial Sequence
  HTT spacer sequence GTCN PAM
ucugggaccauaccaauccc

SEQ ID NO: 23902 - RNA, 20 nt, Artificial Sequence
  HTT spacer sequence GTCN PAM
cagaggaccauccauauuuc

SEQ ID NO: 23903 - RNA, 20 nt, Artificial Sequence
  HTT spacer sequence GTCN PAM
uaggccaucuuaauccaagu

SEQ ID NO: 23904 - RNA, 20 nt, Artificial Sequence
  HTT spacer sequence GTCN PAM
caggagccuggcauugcaaa

SEQ ID NO: 23905 - RNA, 20 nt, Artificial Sequence
  HTT spacer sequence GTCN PAM
uuugaagcuuaagguauuau

SEQ ID NO: 23906 - RNA, 20 nt, Artificial Sequence
  HTT spacer sequence GTCN PAM
agcacacaaacacaaauuac

SEQ ID NO: 23907 - RNA, 20 nt, Artificial Sequence
  HTT spacer sequence GTCN PAM
agauaauggagauaugaaau

SEQ ID NO: 23908 - RNA, 20 nt, Artificial Sequence
  HTT spacer sequence GTCN PAM
guauuucauaucuccauuau

SEQ ID NO: 23909 - RNA, 20 nt, Artificial Sequence
  HTT spacer sequence GTCN PAM
cauuuuauaguuucugauuu

SEQ ID NO: 23910 - RNA, 20 nt, Artificial Sequence
  HTT spacer sequence GTCN PAM
guauaaauuacggucccgaa

SEQ ID NO: 23911 - RNA, 20 nt, Artificial Sequence
  HTT spacer sequence GTCN PAM
cgaaaacugcagaauuccag

SEQ ID NO: 23912 - RNA, 20 nt, Artificial Sequence
  HTT spacer sequence GTCN PAM
gaugacacuacccagaauaa

SEQ ID NO: 23913 - RNA, 20 nt, Artificial Sequence
  HTT spacer sequence GTCN PAM
ucugacuuacuuccuaguuc

SEQ ID NO: 23914 - RNA, 20 nt, Artificial Sequence
  HTT spacer sequence GTCN PAM
uugaaacacggcuucuguuc

SEQ ID NO: 23915 - RNA, 20 nt, Artificial Sequence
  HTT spacer sequence GTCN PAM
ccguccuugaaacacggcuu

SEQ ID NO: 23916 - RNA, 20 nt, Artificial Sequence
  HTT spacer sequence GTCN PAM
agacaaugacaaacaccauc

SEQ ID NO: 23917 - RNA, 20 nt, Artificial Sequence
  HTT spacer sequence GTCN PAM
ggacuugcuuucacaguaug

SEQ ID NO: 23918 - RNA, 20 nt, Artificial Sequence
  HTT spacer sequence GTCN PAM
uugucuggacuugcuuucac

SEQ ID NO: 23919 - RNA, 20 nt, Artificial Sequence
  HTT spacer sequence GTCN PAM
uguguauuguugaugguguu

SEQ ID NO: 23920 - RNA, 20 nt, Artificial Sequence
  HTT spacer sequence GTCN PAM
ccauuaaaugcaucuuaugc

SEQ ID NO: 23921 - RNA, 20 nt, Artificial Sequence
  HTT spacer sequence GTCN PAM
cuggcccugggaugaugaga

SEQ ID NO: 23922 - RNA, 20 nt, Artificial Sequence
  HTT spacer sequence GTCN PAM
caccuuagggaguucacuag

SEQ ID NO: 23923 - RNA, 20 nt, Artificial Sequence
  HTT spacer sequence GTCN PAM
uucuggguauuuguagggaa

SEQ ID NO: 23924 - RNA, 20 nt, Artificial Sequence
  HTT spacer sequence GTCN PAM
uugcuggugaaaagaacauc

SEQ ID NO: 23925 - RNA, 20 nt, Artificial Sequence
  HTT spacer sequence GTCN PAM
ggauguucuuuucaccagca

SEQ ID NO: 23926 - RNA, 20 nt, Artificial Sequence
  HTT spacer sequence GTCN PAM
ccuuugguaaccuagcaaca

SEQ ID NO: 23927 - RNA, 20 nt, Artificial Sequence
  HTT spacer sequence GTCN PAM
gcuuguuggccagauggccc

SEQ ID NO: 23928 - RNA, 20 nt, Artificial Sequence
  HTT spacer sequence GTCN PAM
cuccuuacacccccagacgu

SEQ ID NO: 23929 - RNA, 20 nt, Artificial Sequence
  HTT spacer sequence GTCN PAM
ggggguguaaggagagacaa

SEQ ID NO: 23930 - RNA, 20 nt, Artificial Sequence
  HTT spacer sequence GTCN PAM
uugguuuucuguaguuuugc

SEQ ID NO: 23931 - RNA, 20 nt, Artificial Sequence
  HTT spacer sequence GTCN PAM
auuucauggcugcugcuuug

SEQ ID NO: 23932 - RNA, 20 nt, Artificial Sequence
  HTT spacer sequence GTCN PAM
caacagcaagaaugaaaagu

SEQ ID NO: 23933 - RNA, 20 nt, Artificial Sequence
  HTT spacer sequence GTCN PAM
uccacuuuucauucuugcug

SEQ ID NO: 23934 - RNA, 20 nt, Artificial Sequence
  HTT spacer sequence GTCN PAM
ggagaccaagaccauccugg

SEQ ID NO: 23935 - RNA, 20 nt, Artificial Sequence
  HTT spacer sequence GTCN PAM
ccugaccucgugauccaccc

SEQ ID NO: 23936 - RNA, 20 nt, Artificial Sequence
  HTT spacer sequence GTCN PAM
uggucuccugaccucgugau

SEQ ID NO: 23937 - RNA, 20 nt, Artificial Sequence
  HTT spacer sequence GTCN PAM
cuacuaaaaauacaaaaaaa

SEQ ID NO: 23938 - RNA, 20 nt, Artificial Sequence
  HTT spacer sequence GTCN PAM
ggcaugguggugggugccug

SEQ ID NO: 23939 - RNA, 20 nt, Artificial Sequence
  HTT spacer sequence GTCN PAM
cagcuacucgggaggcugag

SEQ ID NO: 23940 - RNA, 20 nt, Artificial Sequence
  HTT spacer sequence GTCN PAM
cccaggcuggagugcagugg

SEQ ID NO: 23941 - RNA, 20 nt, Artificial Sequence
  HTT spacer sequence GTCN PAM
ugcucugucacccaggcugg

SEQ ID NO: 23942 - RNA, 20 nt, Artificial Sequence
  HTT spacer sequence GTCN PAM
caaaaaaaaaaaaaaaaaaa

SEQ ID NO: 23943 - RNA, 20 nt, Artificial Sequence
  HTT spacer sequence GTCN PAM
cccuuuuuuuuuuuuuuuuu

SEQ ID NO: 23944 - RNA, 20 nt, Artificial Sequence
  HTT spacer sequence GTCN PAM
ucuauugcggaaaucuuucc

SEQ ID NO: 23945 - RNA, 20 nt, Artificial Sequence
  HTT spacer sequence GTCN PAM
aaggaauucuaaaggaugcu

SEQ ID NO: 23946 - RNA, 20 nt, Artificial Sequence
  HTT spacer sequence GTCN PAM
uuuucuucugccuggaaagc

SEQ ID NO: 23947 - RNA, 20 nt, Artificial Sequence
  HTT spacer sequence GTCN PAM
gcuuuuguuuaaauuggccc

SEQ ID NO: 23948 - RNA, 20 nt, Artificial Sequence
  HTT spacer sequence GTCN PAM
cuaucuuuuguaacauauau

SEQ ID NO: 23949 - RNA, 20 nt, Artificial Sequence
  HTT spacer sequence GTCN PAM
agauggauucucacucuguc

SEQ ID NO: 23950 - RNA, 20 nt, Artificial Sequence
  HTT spacer sequence GTCN PAM
cccaggcuacagugaaaugg

SEQ ID NO: 23951 - RNA, 20 nt, Artificial Sequence
  HTT spacer sequence GTCN PAM
cggcucacugcaaccucugc

SEQ ID NO: 23952 - RNA, 20 nt, Artificial Sequence
  HTT spacer sequence GTCN PAM
ugaacaccugaccucaggug

SEQ ID NO: 23953 - RNA, 20 nt, Artificial Sequence
  HTT spacer sequence GTCN PAM
gguguucaagaccagccugg

SEQ ID NO: 23954 - RNA, 20 nt, Artificial Sequence
  HTT spacer sequence GTCN PAM
cccuagaaauuacaacauuc

SEQ ID NO: 23955 - RNA, 20 nt, Artificial Sequence
  HTT spacer sequence GTCN PAM
ccucuuuucauggucacccu

SEQ ID NO: 23956 - RNA, 20 nt, Artificial Sequence
  HTT spacer sequence GTCN PAM
cacuuugucacccaggcugg

SEQ ID NO: 23957 - RNA, 20 nt, Artificial Sequence
  HTT spacer sequence GTCN PAM
cccaggcuggaguguugugg

SEQ ID NO: 23958 - RNA, 20 nt, Artificial Sequence
  HTT spacer sequence GTCN PAM
ugaacuccugaccucaggcg

SEQ ID NO: 23959 - RNA, 20 nt, Artificial Sequence
  HTT spacer sequence GTCN PAM
ggaguucaagaccagccugg

SEQ ID NO: 23960 - RNA, 20 nt, Artificial Sequence
  HTT spacer sequence GTCN PAM
gauuuuauuuuugaaccucu

SEQ ID NO: 23961 - RNA, 20 nt, Artificial Sequence
  HTT spacer sequence GTCN PAM
uucuguauauccuaccagcu

SEQ ID NO: 23962 - RNA, 20 nt, Artificial Sequence
  HTT spacer sequence GTCN PAM
gucuuucuguauauccuacc

SEQ ID NO: 23963 - RNA, 20 nt, Artificial Sequence
  HTT spacer sequence GTCN PAM
aagaccccacauaagaagcu

SEQ ID NO: 23964 - RNA, 20 nt, Artificial Sequence
  HTT spacer sequence GTCN PAM
uugacaacccucguuuuuaa

SEQ ID NO: 23965 - RNA, 20 nt, Artificial Sequence
  HTT spacer sequence GTCN PAM
uguuuccuuagguucuaggu

SEQ ID NO: 23966 - RNA, 20 nt, Artificial Sequence
  HTT spacer sequence GTCN PAM
uccuucaucuguccuguuuc

SEQ ID NO: 23967 - RNA, 20 nt, Artificial Sequence
  HTT spacer sequence GTCN PAM
ugcgccucagccauccuaug

SEQ ID NO: 23968 - RNA, 20 nt, Artificial Sequence
  HTT spacer sequence GTCN PAM
cauaggauggcugaggcgca

SEQ ID NO: 23969 - RNA, 20 nt, Artificial Sequence
  HTT spacer sequence GTCN PAM
gcagcugggcccgugcucuu

SEQ ID NO: 23970 - RNA, 20 nt, Artificial Sequence
  HTT spacer sequence GTCN PAM
agcaacuggagagcagagga

SEQ ID NO: 23971 - RNA, 20 nt, Artificial Sequence
  HTT spacer sequence GTCN PAM
gcgucaggguuuccuucuuu

SEQ ID NO: 23972 - RNA, 20 nt, Artificial Sequence
  HTT spacer sequence GTCN PAM
ggguuuccuucuuuuccagc

SEQ ID NO: 23973 - RNA, 20 nt, Artificial Sequence
  HTT spacer sequence GTCN PAM
cgggucggggcugcucccgc

SEQ ID NO: 23974 - RNA, 20 nt, Artificial Sequence
  HTT spacer sequence GTCN PAM
gggcugcucccgcuuacugc

SEQ ID NO: 23975 - RNA, 20 nt, Artificial Sequence
  HTT spacer sequence GTCN PAM
ugccgagaagagagaagagg

SEQ ID NO: 23976 - RNA, 20 nt, Artificial Sequence
  HTT spacer sequence GTCN PAM
ugcuuagcuccccgcccagu

SEQ ID NO: 23977 - RNA, 20 nt, Artificial Sequence
  HTT spacer sequence GTCN PAM
cugcuaugacuuggugacua

SEQ ID NO: 23978 - RNA, 20 nt, Artificial Sequence
  HTT spacer sequence GTCN PAM
uagcagugacucucucuggg

SEQ ID NO: 23979 - RNA, 20 nt, Artificial Sequence
  HTT spacer sequence GTCN PAM
ccaagucauagcagugacuc

SEQ ID NO: 23980 - RNA, 20 nt, Artificial Sequence
  HTT spacer sequence GTCN PAM
caaaaaaaaaaaaaagagcg

SEQ ID NO: 23981 - RNA, 20 nt, Artificial Sequence
  HTT spacer sequence GTCN PAM
ugcucugucacccaggcugg

SEQ ID NO: 23982 - RNA, 20 nt, Artificial Sequence
  HTT spacer sequence GTCN PAM
cccaggcuggagugcagugg

SEQ ID NO: 23983 - RNA, 20 nt, Artificial Sequence
  HTT spacer sequence GTCN PAM
ggcggacuugaacuccugac

SEQ ID NO: 23984 - RNA, 20 nt, Artificial Sequence
  HTT spacer sequence GTCN PAM
gccugaccaacaagaugaaa

SEQ ID NO: 23985 - RNA, 20 nt, Artificial Sequence
  HTT spacer sequence GTCN PAM
ggaguucaaguccgccugac

SEQ ID NO: 23986 - RNA, 20 nt, Artificial Sequence
  HTT spacer sequence GTCN PAM
cccauucuaaagaaaaaaca

SEQ ID NO: 23987 - RNA, 20 nt, Artificial Sequence
  HTT spacer sequence GTCN PAM
gcuagcauguuguaagccuu

SEQ ID NO: 23988 - RNA, 20 nt, Artificial Sequence
  HTT spacer sequence GTCN PAM
caagugcucaucuggaacag

SEQ ID NO: 23989 - RNA, 20 nt, Artificial Sequence
  HTT spacer sequence GTCN PAM
uuagaauccuguuccagaug

SEQ ID NO: 23990 - RNA, 20 nt, Artificial Sequence
  HTT spacer sequence GTCN PAM
uaaguguugcuauaauaaau

SEQ ID NO: 23991 - RNA, 20 nt, Artificial Sequence
  HTT spacer sequence GTCN PAM
ggcaugugugaucaaugauu

SEQ ID NO: 23992 - RNA, 20 nt, Artificial Sequence
  HTT spacer sequence GTCN PAM
cugaacagcaaaaacauuuc

SEQ ID NO: 23993 - RNA, 20 nt, Artificial Sequence
  HTT spacer sequence GTCN PAM
cugaggccuaaaaaugggca

SEQ ID NO: 23994 - RNA, 20 nt, Artificial Sequence
  HTT spacer sequence GTCN PAM
ggcauggugucucugaggcc

SEQ ID NO: 23995 - RNA, 20 nt, Artificial Sequence
  HTT spacer sequence GTCN PAM
ugacaguccauuucuguaag

SEQ ID NO: 23996 - RNA, 20 nt, Artificial Sequence
  HTT spacer sequence GTCN PAM
agacacagguuuuuaaaguu

SEQ ID NO: 23997 - RNA, 20 nt, Artificial Sequence
  HTT spacer sequence GTCN PAM
auuucuguaagucuuucaca

SEQ ID NO: 23998 - RNA, 20 nt, Artificial Sequence
  HTT spacer sequence GTCN PAM
uucacauuagauuuccuguc

SEQ ID NO: 23999 - RNA, 20 nt, Artificial Sequence
  HTT spacer sequence GTCN PAM
ggaugauagucaauucuagg

SEQ ID NO: 24000 - RNA, 20 nt, Artificial Sequence
  HTT spacer sequence GTCN PAM
auucuaggcagaugauguuu

SEQ ID NO: 24001 - RNA, 20 nt, Artificial Sequence
  HTT spacer sequence GTCN PAM
cgaugauccauugccucccu

SEQ ID NO: 24002 - RNA, 20 nt, Artificial Sequence
  HTT spacer sequence GTCN PAM
uucuguuauaugcucccaaa

SEQ ID NO: 24003 - RNA, 20 nt, Artificial Sequence
  HTT spacer sequence GTCN PAM
cagcagcucagacggaagug

SEQ ID NO: 24004 - RNA, 20 nt, Artificial Sequence
  HTT spacer sequence GTCN PAM
gagcugcugugacuccaggu

SEQ ID NO: 24005 - RNA, 20 nt, Artificial Sequence
  HTT spacer sequence GTCN PAM
uuccagccuggccuggaauu

SEQ ID NO: 24006 - RNA, 20 nt, Artificial Sequence
  HTT spacer sequence GTCN PAM
ucugggcccccuccuuccag

SEQ ID NO: 24007 - RNA, 20 nt, Artificial Sequence
  HTT spacer sequence GTCN PAM
cagccaacacaucccauucc

SEQ ID NO: 24008 - RNA, 20 nt, Artificial Sequence
  HTT spacer sequence GTCN PAM
uucccuucauuuuaugugau

SEQ ID NO: 24009 - RNA, 20 nt, Artificial Sequence
  HTT spacer sequence GTCN PAM
uuccuucagcuagcuauggc

SEQ ID NO: 24010 - RNA, 20 nt, Artificial Sequence
  HTT spacer sequence GTCN PAM
cuguccuuccuucagcuagc

SEQ ID NO: 24011 - RNA, 20 nt, Artificial Sequence
  HTT spacer sequence GTCN PAM
uacacuagcuaagaggcaaa

SEQ ID NO: 24012 - RNA, 20 nt, Artificial Sequence
  HTT spacer sequence GTCN PAM
cuaaagaaggucagagcggc

SEQ ID NO: 24013 - RNA, 20 nt, Artificial Sequence
  HTT spacer sequence GTCN PAM
gagcggcugcuagggugcaa

SEQ ID NO: 24014 - RNA, 20 nt, Artificial Sequence
  HTT spacer sequence GTCN PAM
cauaacaauaaguaauagag

SEQ ID NO: 24015 - RNA, 20 nt, Artificial Sequence
  HTT spacer sequence GTCN PAM
cucauucagguugauguccu

SEQ ID NO: 24016 - RNA, 20 nt, Artificial Sequence
  HTT spacer sequence GTCN PAM
uaagccccagaaccucagaa

SEQ ID NO: 24017 - RNA, 20 nt, Artificial Sequence
  HTT spacer sequence GTCN PAM
ccaaauacaaucccauucug

SEQ ID NO: 24018 - RNA, 20 nt, Artificial Sequence
  HTT spacer sequence GTCN PAM
gauuauggcccacccuaaug

SEQ ID NO: 24019 - RNA, 20 nt, Artificial Sequence
  HTT spacer sequence GTCN PAM
uacaagaagagauuaggaca

SEQ ID NO: 24020 - RNA, 20 nt, Artificial Sequence
  HTT spacer sequence GTCN PAM
uaaucucuucuuguaagaca

SEQ ID NO: 24021 - RNA, 20 nt, Artificial Sequence
  HTT spacer sequence GTCN PAM
guguccuaaucucuucuugu

SEQ ID NO: 24022 - RNA, 20 nt, Artificial Sequence
  HTT spacer sequence GTCN PAM
cucugagcauguccgugucc

SEQ ID NO: 24023 - RNA, 20 nt, Artificial Sequence
  HTT spacer sequence GTCN PAM
ucacguggccgucccucuga

SEQ ID NO: 24024 - RNA, 20 nt, Artificial Sequence
  HTT spacer sequence GTCN PAM
gcaagucaaggacagggcuc

SEQ ID NO: 24025 - RNA, 20 nt, Artificial Sequence
  HTT spacer sequence GTCN PAM
aggacagggcucaggggaaa

SEQ ID NO: 24026 - RNA, 20 nt, Artificial Sequence
  HTT spacer sequence GTCN PAM
uugacuugcagacagcugcc

SEQ ID NO: 24027 - RNA, 20 nt, Artificial Sequence
  HTT spacer sequence GTCN PAM
gagaugaagguguuggcaag

SEQ ID NO: 24028 - RNA, 20 nt, Artificial Sequence
  HTT spacer sequence GTCN PAM
uagaggcuagaaguccgaga

SEQ ID NO: 24029 - RNA, 20 nt, Artificial Sequence
  HTT spacer sequence GTCN PAM
gugguacuuuguuauggcag

SEQ ID NO: 24030 - RNA, 20 nt, Artificial Sequence
  HTT spacer sequence GTCN PAM
ucugcugcuggaacaaauca

SEQ ID NO: 24031 - RNA, 20 nt, Artificial Sequence
  HTT spacer sequence GTCN PAM
agucauagaguuauauguag

SEQ ID NO: 24032 - RNA, 20 nt, Artificial Sequence
  HTT spacer sequence GTCN PAM
uagaguuauauguaguuacg

SEQ ID NO: 24033 - RNA, 20 nt, Artificial Sequence
  HTT spacer sequence GTCN PAM
cacguucugugggucaggaa

SEQ ID NO: 24034 - RNA, 20 nt, Artificial Sequence
  HTT spacer sequence GTCN PAM
ggaauuuggacccagcuuaa

SEQ ID NO: 24035 - RNA, 20 nt, Artificial Sequence
  HTT spacer sequence GTCN PAM
aaauuccugacccacagaac

SEQ ID NO: 24036 - RNA, 20 nt, Artificial Sequence
  HTT spacer sequence GTCN PAM
aauaccagcugccucccacc

SEQ ID NO: 24037 - RNA, 20 nt, Artificial Sequence
  HTT spacer sequence GTCN PAM
cuuuccaaucucacguggug

SEQ ID NO: 24038 - RNA, 20 nt, Artificial Sequence
  HTT spacer sequence GTCN PAM
agcaggccaugaggaacugg

SEQ ID NO: 24039 - RNA, 20 nt, Artificial Sequence
  HTT spacer sequence GTCN PAM
ucgccaugugggccucucca

SEQ ID NO: 24040 - RNA, 20 nt, Artificial Sequence
  HTT spacer sequence GTCN PAM
gcugccauguuggagaggcc

SEQ ID NO: 24041 - RNA, 20 nt, Artificial Sequence
  HTT spacer sequence GTCN PAM
cccuggcccucucuguugcc

SEQ ID NO: 24042 - RNA, 20 nt, Artificial Sequence
  HTT spacer sequence GTCN PAM
uacccuuuugcgaccuaguc

SEQ ID NO: 24043 - RNA, 20 nt, Artificial Sequence
  HTT spacer sequence GTCN PAM
caaaaggguaugacuucagu

SEQ ID NO: 24044 - RNA, 20 nt, Artificial Sequence
  HTT spacer sequence GTCN PAM
uggggugacauuccaucacc

SEQ ID NO: 24045 - RNA, 20 nt, Artificial Sequence
  HTT spacer sequence GTCN PAM
ccccaugacuaggucgcaaa

SEQ ID NO: 24046 - RNA, 20 nt, Artificial Sequence
  HTT spacer sequence GTCN PAM
uacaagggugucaauaccag

SEQ ID NO: 24047 - RNA, 20 nt, Artificial Sequence
  HTT spacer sequence GTCN PAM
auaccaggaggugaggggug

SEQ ID NO: 24048 - RNA, 20 nt, Artificial Sequence
  HTT spacer sequence GTCN PAM
gcccacugagguaacuaaca

SEQ ID NO: 24049 - RNA, 20 nt, Artificial Sequence
  HTT spacer sequence GTCN PAM
ggccucaagguuguuaguua

SEQ ID NO: 24050 - RNA, 20 nt, Artificial Sequence
  HTT spacer sequence GTCN PAM
acugugucaggccucaaggu

SEQ ID NO: 24051 - RNA, 20 nt, Artificial Sequence
  HTT spacer sequence GTCN PAM
caaaaauaaauaaauaaaua

SEQ ID NO: 24052 - RNA, 20 nt, Artificial Sequence
  HTT spacer sequence GTCN PAM
cacucuugucacccaggcug

SEQ ID NO: 24053 - RNA, 20 nt, Artificial Sequence
  HTT spacer sequence GTCN PAM
cccaggcuggagugcaaugg

SEQ ID NO: 24054 - RNA, 20 nt, Artificial Sequence
  HTT spacer sequence GTCN PAM
cagcuauuccggaggcugag

SEQ ID NO: 24055 - RNA, 20 nt, Artificial Sequence
  HTT spacer sequence GTCN PAM
cuacuaaaaauacaaaaauu

SEQ ID NO: 24056 - RNA, 20 nt, Artificial Sequence
  HTT spacer sequence GTCN PAM
cgaacuccugaccucuggug

SEQ ID NO: 24057 - RNA, 20 nt, Artificial Sequence
  HTT spacer sequence GTCN PAM
ggaguucgagaccagccugg

SEQ ID NO: 24058 - RNA, 20 nt, Artificial Sequence
  HTT spacer sequence GTCN PAM
cuaaaaaaauuaaguuccag

SEQ ID NO: 24059 - RNA, 20 nt, Artificial Sequence
  HTT spacer sequence GTCN PAM
cucuaucacccaagcuggag

SEQ ID NO: 24060 - RNA, 20 nt, Artificial Sequence
  HTT spacer sequence GTCN PAM
uucucaagaaaagggaggcu

SEQ ID NO: 24061 - RNA, 20 nt, Artificial Sequence
  HTT spacer sequence GTCN PAM
ccagugggguagcaguagcc

SEQ ID NO: 24062 - RNA, 20 nt, Artificial Sequence
  HTT spacer sequence GTCN PAM
uaaagggaaacccagcauug

SEQ ID NO: 24063 - RNA, 20 nt, Artificial Sequence
  HTT spacer sequence GTCN PAM
cagagccuguccuaaaggga

SEQ ID NO: 24064 - RNA, 20 nt, Artificial Sequence
  HTT spacer sequence GTCN PAM
ccugcucuguggccacaaac

SEQ ID NO: 24065 - RNA, 20 nt, Artificial Sequence
  HTT spacer sequence GTCN PAM
cugaggccaaccuuacuccc

SEQ ID NO: 24066 - RNA, 20 nt, Artificial Sequence
  HTT spacer sequence GTCN PAM
agccugcccagcagggagua

SEQ ID NO: 24067 - RNA, 20 nt, Artificial Sequence
  HTT spacer sequence GTCN PAM
ccagagccuccugccuuuug

SEQ ID NO: 24068 - RNA, 20 nt, Artificial Sequence
  HTT spacer sequence GTCN PAM
uggucuccagagccuccugc

SEQ ID NO: 24069 - RNA, 20 nt, Artificial Sequence
  HTT spacer sequence GTCN PAM
caggcgugagggggugcccc

SEQ ID NO: 24070 - RNA, 20 nt, Artificial Sequence
  HTT spacer sequence GTCN PAM
guggggcacccccucacgcc

SEQ ID NO: 24071 - RNA, 20 nt, Artificial Sequence
  HTT spacer sequence GTCN PAM
uucagcagcagcucagcaga

SEQ ID NO: 24072 - RNA, 20 nt, Artificial Sequence
  HTT spacer sequence GTCN PAM
ugccggaaggucagagcagg

SEQ ID NO: 24073 - RNA, 20 nt, Artificial Sequence
  HTT spacer sequence GTCN PAM
gagcaggggugcacucccau

SEQ ID NO: 24074 - RNA, 20 nt, Artificial Sequence
  HTT spacer sequence GTCN PAM
ggacucauuccugugggcgg

SEQ ID NO: 24075 - RNA, 20 nt, Artificial Sequence
  HTT spacer sequence GTCN PAM
cgaccugggggcguuucuuu

SEQ ID NO: 24076 - RNA, 20 nt, Artificial Sequence
  HTT spacer sequence GTCN PAM
gcgccugcugcccacagagg

SEQ ID NO: 24077 - RNA, 20 nt, Artificial Sequence
  HTT spacer sequence GTCN PAM
ggggcaggccugggugguca

SEQ ID NO: 24078 - RNA, 20 nt, Artificial Sequence
  HTT spacer sequence GTCN PAM
cagcgcagcgccccggaagg

SEQ ID NO: 24079 - RNA, 20 nt, Artificial Sequence
  HTT spacer sequence GTCN PAM
acaggccuggcgccccccau

SEQ ID NO: 24080 - RNA, 20 nt, Artificial Sequence
  HTT spacer sequence GTCN PAM
cacuugggguccucaggucg

SEQ ID NO: 24081 - RNA, 20 nt, Artificial Sequence
  HTT spacer sequence GTCN PAM
ucaggucgugccgaccacgc

SEQ ID NO: 24082 - RNA, 20 nt, Artificial Sequence
  HTT spacer sequence GTCN PAM
ugccgaccacgcgcauucuc

SEQ ID NO: 24083 - RNA, 20 nt, Artificial Sequence
  HTT spacer sequence GTCN PAM
gcacgaccugaggaccccaa

SEQ ID NO: 24084 - RNA, 20 nt, Artificial Sequence
  HTT spacer sequence GTCN PAM
gggugaguauggcucuggcc

SEQ ID NO: 24085 - RNA, 20 nt, Artificial Sequence
  HTT spacer sequence GTCN PAM
acggccggcugucgccccgc

SEQ ID NO: 24086 - RNA, 20 nt, Artificial Sequence
  HTT spacer sequence GTCN PAM
ccccgcuccaggcgucggcg

SEQ ID NO: 24087 - RNA, 20 nt, Artificial Sequence
  HTT spacer sequence GTCN PAM
gcgggggauccuuuccgcau

SEQ ID NO: 24088 - RNA, 20 nt, Artificial Sequence
  HTT spacer sequence GTCN PAM
auggccccguccuucauggg

SEQ ID NO: 24089 - RNA, 20 nt, Artificial Sequence
  HTT spacer sequence GTCN PAM
uucaugggcgagccccucca

SEQ ID NO: 24090 - RNA, 20 nt, Artificial Sequence
  HTT spacer sequence GTCN PAM
ccuccccuaucccgcuccgc

SEQ ID NO: 24091 - RNA, 20 nt, Artificial Sequence
  HTT spacer sequence GTCN PAM
ccguccccagcaucgccccg

SEQ ID NO: 24092 - RNA, 20 nt, Artificial Sequence
  HTT spacer sequence GTCN PAM
ccagcaucgccccgccccgc

SEQ ID NO: 24093 - RNA, 20 nt, Artificial Sequence
  HTT spacer sequence GTCN PAM
cgccccgccccucaggcggc

SEQ ID NO: 24094 - RNA, 20 nt, Artificial Sequence
  HTT spacer sequence GTCN PAM
cgccccgucccuuccucguc

SEQ ID NO: 24095 - RNA, 20 nt, Artificial Sequence
  HTT spacer sequence GTCN PAM
cuuccucgucccgccucgcc

SEQ ID NO: 24096 - RNA, 20 nt, Artificial Sequence
  HTT spacer sequence GTCN PAM
cgccucgccgcgacacuuca

SEQ ID NO: 24097 - RNA, 20 nt, Artificial Sequence
  HTT spacer sequence GTCN PAM
cggcgaggcgggacgaggaa

SEQ ID NO: 24098 - RNA, 20 nt, Artificial Sequence
  HTT spacer sequence GTCN PAM
caccacgccccguccccucu

SEQ ID NO: 24099 - RNA, 20 nt, Artificial Sequence
  HTT spacer sequence GTCN PAM
ccucuccguugagccccgcg

SEQ ID NO: 24100 - RNA, 20 nt, Artificial Sequence
  HTT spacer sequence GTCN PAM
gcggccuugcugugugaggc

SEQ ID NO: 24101 - RNA, 20 nt, Artificial Sequence
  HTT spacer sequence GTCN PAM
gcaggcuagggcugucaauc

SEQ ID NO: 24102 - RNA, 20 nt, Artificial Sequence
  HTT spacer sequence GTCN PAM
aucaugcuggccggcguggc

SEQ ID NO: 24103 - RNA, 20 nt, Artificial Sequence
  HTT spacer sequence GTCN PAM
gggacgcaaggcgccguggg

SEQ ID NO: 24104 - RNA, 20 nt, Artificial Sequence
  HTT spacer sequence GTCN PAM
cagacgcugcgccggcggag

SEQ ID NO: 24105 - RNA, 20 nt, Artificial Sequence
  HTT spacer sequence GTCN PAM
cggcagcccccacggcgccu

SEQ ID NO: 24106 - RNA, 20 nt, Artificial Sequence
  HTT spacer sequence GTCN PAM
aagauggacggccgcucagg

SEQ ID NO: 24107 - RNA, 20 nt, Artificial Sequence
  HTT spacer sequence GTCN PAM
aucuuggacccgucccggca

SEQ ID NO: 24108 - RNA, 20 nt, Artificial Sequence
  HTT spacer sequence GTCN PAM
gcccgaggccuccggggacu

SEQ ID NO: 24109 - RNA, 20 nt, Artificial Sequence
  HTT spacer sequence GTCN PAM
ccggaggccucgggccgacu

SEQ ID NO: 24110 - RNA, 20 nt, Artificial Sequence
  HTT spacer sequence GTCN PAM
cccgcccggcacggcagucc

SEQ ID NO: 24111 - RNA, 20 nt, Artificial Sequence
  HTT spacer sequence GTCN PAM
ccauggcggucucccgcccg

SEQ ID NO: 24112 - RNA, 20 nt, Artificial Sequence
  HTT spacer sequence GTCN PAM
cucaaguccuuccagcagca

SEQ ID NO: 24113 - RNA, 20 nt, Artificial Sequence
  HTT spacer sequence GTCN PAM
uuccagcagcagcagcagca

SEQ ID NO: 24114 - RNA, 20 nt, Artificial Sequence
  HTT spacer sequence GTCN PAM
gugcagcggcuccucagcca

SEQ ID NO: 24115 - RNA, 20 nt, Artificial Sequence
  HTT spacer sequence GTCN PAM
cggcgggucccaggcuacgg

SEQ ID NO: 24116 - RNA, 20 nt, Artificial Sequence
  HTT spacer sequence GTCN PAM
caggcuacggcggggauggc

SEQ ID NO: 24117 - RNA, 20 nt, Artificial Sequence
  HTT spacer sequence GTCN PAM
ccggcccgcaggcugcaggg

SEQ ID NO: 24118 - RNA, 20 nt, Artificial Sequence
  HTT spacer sequence GTCN PAM
cugcggggccggggguucgu

SEQ ID NO: 24119 - RNA, 20 nt, Artificial Sequence
  HTT spacer sequence GTCN PAM
cucugucucugcggggccgg

SEQ ID NO: 24120 - RNA, 20 nt, Artificial Sequence
  HTT spacer sequence GTCN PAM
cucaugggcucuggguugcu

SEQ ID NO: 24121 - RNA, 20 nt, Artificial Sequence
  HTT spacer sequence GTCN PAM
ucccuuguccucucgcgagg

SEQ ID NO: 24122 - RNA, 20 nt, Artificial Sequence
  HTT spacer sequence GTCN PAM
ucucgcgaggggaggcagag

SEQ ID NO: 24123 - RNA, 20 nt, Artificial Sequence
  HTT spacer sequence GTCN PAM
ugaauucaccgaggggaguc

SEQ ID NO: 24124 - RNA, 20 nt, Artificial Sequence
  HTT spacer sequence GTCN PAM
cggccucagcccucucgccc

SEQ ID NO: 24125 - RNA, 20 nt, Artificial Sequence
  HTT spacer sequence GTCN PAM
gagagggaagagggcugggg

SEQ ID NO: 24126 - RNA, 20 nt, Artificial Sequence
  HTT spacer sequence GTCN PAM
cgcgcccccagcccucuucc

SEQ ID NO: 24127 - RNA, 20 nt, Artificial Sequence
  HTT spacer sequence GTCN PAM
uccacugcccccacaucucu

SEQ ID NO: 24128 - RNA, 20 nt, Artificial Sequence
  HTT spacer sequence GTCN PAM
uaaaagcauuaugucaucca

SEQ ID NO: 24129 - RNA, 20 nt, Artificial Sequence
  HTT spacer sequence GTCN PAM
aaugggagauuucuuuuccu

SEQ ID NO: 24130 - RNA, 20 nt, Artificial Sequence
  HTT spacer sequence GTCN PAM
ggacauuucauuuaguucau

SEQ ID NO: 24131 - RNA, 20 nt, Artificial Sequence
  HTT spacer sequence GTCN PAM
ugacaauguaggaagagccu

SEQ ID NO: 24132 - RNA, 20 nt, Artificial Sequence
  HTT spacer sequence GTCN PAM
gcaggcguuugaaugaguug

SEQ ID NO: 24133 - RNA, 20 nt, Artificial Sequence
  HTT spacer sequence GTCN PAM
ggcuugccagaauacggggg

SEQ ID NO: 24134 - RNA, 20 nt, Artificial Sequence
  HTT spacer sequence GTCN PAM
gcagacuccgugggcaucuc

SEQ ID NO: 24135 - RNA, 20 nt, Artificial Sequence
  HTT spacer sequence GTCN PAM
gcggaccccccguauucugg

SEQ ID NO: 24136 - RNA, 20 nt, Artificial Sequence
  HTT spacer sequence GTCN PAM
gcaaugaagcaaacagaaac

SEQ ID NO: 24137 - RNA, 20 nt, Artificial Sequence
  HTT spacer sequence GTCN PAM
cucuuuuccuguuucaaaaa

SEQ ID NO: 24138 - RNA, 20 nt, Artificial Sequence
  HTT spacer sequence GTCN PAM
ugggguuccgcuagauguuu

SEQ ID NO: 24139 - RNA, 20 nt, Artificial Sequence
  HTT spacer sequence GTCN PAM
gugugucgaguguacaguag

SEQ ID NO: 24140 - RNA, 20 nt, Artificial Sequence
  HTT spacer sequence GTCN PAM
aguguacaguaggaguuagg

SEQ ID NO: 24141 - RNA, 20 nt, Artificial Sequence
  HTT spacer sequence GTCN PAM
cagauggcauuugguaagaa

SEQ ID NO: 24142 - RNA, 20 nt, Artificial Sequence
  HTT spacer sequence GTCN PAM
uaacagagauauucuuacca

SEQ ID NO: 24143 - RNA, 20 nt, Artificial Sequence
  HTT spacer sequence GTCN PAM
cgucuucaaaguuuaauuag

SEQ ID NO: 24144 - RNA, 20 nt, Artificial Sequence
  HTT spacer sequence GTCN PAM
ucaaaguuuaauuagaaaau

SEQ ID NO: 24145 - RNA, 20 nt, Artificial Sequence
  HTT spacer sequence GTCN PAM
uaaaaguucacacauugcau

SEQ ID NO: 24146 - RNA, 20 nt, Artificial Sequence
  HTT spacer sequence GTCN PAM
uccuucccaucaggagcccu

SEQ ID NO: 24147 - RNA, 20 nt, Artificial Sequence
  HTT spacer sequence GTCN PAM
gaagcagcccagcagaaagg

SEQ ID NO: 24148 - RNA, 20 nt, Artificial Sequence
  HTT spacer sequence GTCN PAM
aaucagcauaagaaagagaa

SEQ ID NO: 24149 - RNA, 20 nt, Artificial Sequence
  HTT spacer sequence GTCN PAM
aggcagcaaaggaaauuucu

SEQ ID NO: 24150 - RNA, 20 nt, Artificial Sequence
  HTT spacer sequence GTCN PAM
ugauuaaauuuuuuaaauaa

SEQ ID NO: 24151 - RNA, 20 nt, Artificial Sequence
  HTT spacer sequence GTCN PAM
accuaggccucccaaagugc

SEQ ID NO: 24152 - RNA, 20 nt, Artificial Sequence
  HTT spacer sequence GTCN PAM
ggaguuugagaccagccugg

SEQ ID NO: 24153 - RNA, 20 nt, Artificial Sequence
  HTT spacer sequence GTCN PAM
caaacuccugaccucaggug

SEQ ID NO: 24154 - RNA, 20 nt, Artificial Sequence
  HTT spacer sequence GTCN PAM
cuacuaaaaauacaaaaauu

SEQ ID NO: 24155 - RNA, 20 nt, Artificial Sequence
  HTT spacer sequence GTCN PAM
ugguggcacgugccuguaau

SEQ ID NO: 24156 - RNA, 20 nt, Artificial Sequence
  HTT spacer sequence GTCN PAM
gcagugaguugagaucacgc

SEQ ID NO: 24157 - RNA, 20 nt, Artificial Sequence
  HTT spacer sequence GTCN PAM
cccaggcuggagugcagugg

SEQ ID NO: 24158 - RNA, 20 nt, Artificial Sequence
  HTT spacer sequence GTCN PAM
cgcucugucacccaggcugg

SEQ ID NO: 24159 - RNA, 20 nt, Artificial Sequence
  HTT spacer sequence GTCN PAM
auguauuacuuaugcaaaaa

SEQ ID NO: 24160 - RNA, 20 nt, Artificial Sequence
  HTT spacer sequence GTCN PAM
ccaagaacaagcacuauuuc

SEQ ID NO: 24161 - RNA, 20 nt, Artificial Sequence
  HTT spacer sequence GTCN PAM
cacauugucacccaggcugg

SEQ ID NO: 24162 - RNA, 20 nt, Artificial Sequence
  HTT spacer sequence GTCN PAM
cccaggcuggagugcaguga

SEQ ID NO: 24163 - RNA, 20 nt, Artificial Sequence
  HTT spacer sequence GTCN PAM
cugccucccagguucaaaug

SEQ ID NO: 24164 - RNA, 20 nt, Artificial Sequence
  HTT spacer sequence GTCN PAM
agcuaauuuuuguauuuuua

SEQ ID NO: 24165 - RNA, 20 nt, Artificial Sequence
  HTT spacer sequence GTCN PAM
ugaacuccugaccuugugau

SEQ ID NO: 24166 - RNA, 20 nt, Artificial Sequence
  HTT spacer sequence GTCN PAM
ggaguucaagaccagccugg

SEQ ID NO: 24167 - RNA, 20 nt, Artificial Sequence
  HTT spacer sequence GTCN PAM
accucggccucccaaagugc

SEQ ID NO: 24168 - RNA, 20 nt, Artificial Sequence
  HTT spacer sequence GTCN PAM
uauuucucuguauuuugcug

SEQ ID NO: 24169 - RNA, 20 nt, Artificial Sequence
  HTT spacer sequence GTCN PAM
cgccaugcaugggccucagu

SEQ ID NO: 24170 - RNA, 20 nt, Artificial Sequence
  HTT spacer sequence GTCN PAM
ucacaguaauuaggaggcaa

SEQ ID NO: 24171 - RNA, 20 nt, Artificial Sequence
  HTT spacer sequence GTCN PAM
gggaaacaccagauaggaau

SEQ ID NO: 24172 - RNA, 20 nt, Artificial Sequence
  HTT spacer sequence GTCN PAM
gcucacugcugagcccugca

SEQ ID NO: 24173 - RNA, 20 nt, Artificial Sequence
  HTT spacer sequence GTCN PAM
uucauuagaaugaaagcuuc

SEQ ID NO: 24174 - RNA, 20 nt, Artificial Sequence
  HTT spacer sequence GTCN PAM
auguccuucauuagaaugaa

SEQ ID NO: 24175 - RNA, 20 nt, Artificial Sequence
  HTT spacer sequence GTCN PAM
ggguuaaucgaguguuaacu

SEQ ID NO: 24176 - RNA, 20 nt, Artificial Sequence
  HTT spacer sequence GTCN PAM
agcaggcuuucuggguuuug

SEQ ID NO: 24177 - RNA, 20 nt, Artificial Sequence
  HTT spacer sequence GTCN PAM
acacuuagugcuacagcucu

SEQ ID NO: 24178 - RNA, 20 nt, Artificial Sequence
  HTT spacer sequence GTCN PAM
caaaaaaaacaaaacaaaac

SEQ ID NO: 24179 - RNA, 20 nt, Artificial Sequence
  HTT spacer sequence GTCN PAM
auaaucccagcuaaacagga

SEQ ID NO: 24180 - RNA, 20 nt, Artificial Sequence
  HTT spacer sequence GTCN PAM
cgggggaaaaaaaaaaaauu

SEQ ID NO: 24181 - RNA, 20 nt, Artificial Sequence
  HTT spacer sequence GTCN PAM
ugcucugucgcccaggcugg

SEQ ID NO: 24182 - RNA, 20 nt, Artificial Sequence
  HTT spacer sequence GTCN PAM
cccaggcuggagugcagugg

SEQ ID NO: 24183 - RNA, 20 nt, Artificial Sequence
  HTT spacer sequence GTCN PAM
cccaaguagcugggacuaca

SEQ ID NO: 24184 - RNA, 20 nt, Artificial Sequence
  HTT spacer sequence GTCN PAM
cagcuacuugggagacugag

SEQ ID NO: 24185 - RNA, 20 nt, Artificial Sequence
  HTT spacer sequence GTCN PAM
agcuaauuuuuuuguauuuu

SEQ ID NO: 24186 - RNA, 20 nt, Artificial Sequence
  HTT spacer sequence GTCN PAM
cuauuaaaaauacaaaaaaa

SEQ ID NO: 24187 - RNA, 20 nt, Artificial Sequence
  HTT spacer sequence GTCN PAM
ggagaucaagaucauccugg

SEQ ID NO: 24188 - RNA, 20 nt, Artificial Sequence
  HTT spacer sequence GTCN PAM
uccgccgaccuugugauccg

SEQ ID NO: 24189 - RNA, 20 nt, Artificial Sequence
  HTT spacer sequence GTCN PAM
gcggaugacgaggucaggag

SEQ ID NO: 24190 - RNA, 20 nt, Artificial Sequence
  HTT spacer sequence GTCN PAM
cgaacucccggccucaugug

SEQ ID NO: 24191 - RNA, 20 nt, Artificial Sequence
  HTT spacer sequence GTCN PAM
acugagaagacagcuuuuuu

SEQ ID NO: 24192 - RNA, 20 nt, Artificial Sequence
  HTT spacer sequence GTCN PAM
ucucaguggaccuucccuga

SEQ ID NO: 24193 - RNA, 20 nt, Artificial Sequence
  HTT spacer sequence GTCN PAM
ugcucuuuaacccaggcugg

SEQ ID NO: 24194 - RNA, 20 nt, Artificial Sequence
  HTT spacer sequence GTCN PAM
caacacauugugagguugag

SEQ ID NO: 24195 - RNA, 20 nt, Artificial Sequence
  HTT spacer sequence GTCN PAM
uuacucaaaagccaucaucu

SEQ ID NO: 24196 - RNA, 20 nt, Artificial Sequence
  HTT spacer sequence GTCN PAM
aguguaaggguguaugaagu

SEQ ID NO: 24197 - RNA, 20 nt, Artificial Sequence
  HTT spacer sequence GTCN PAM
aaaaucuuccuguuucagga

SEQ ID NO: 24198 - RNA, 20 nt, Artificial Sequence
  HTT spacer sequence GTCN PAM
uuuuaguugggugaauugag

SEQ ID NO: 24199 - RNA, 20 nt, Artificial Sequence
  HTT spacer sequence GTCN PAM
cccucacucaauucacccaa

SEQ ID NO: 24200 - RNA, 20 nt, Artificial Sequence
  HTT spacer sequence GTCN PAM
aagaggucaagggagugcca

SEQ ID NO: 24201 - RNA, 20 nt, Artificial Sequence
  HTT spacer sequence GTCN PAM
agggagugccauaucagacc

SEQ ID NO: 24202 - RNA, 20 nt, Artificial Sequence
  HTT spacer sequence GTCN PAM
gauauggcacucccuugacc

SEQ ID NO: 24203 - RNA, 20 nt, Artificial Sequence
  HTT spacer sequence GTCN PAM
cuggaggauuagagcagagg

SEQ ID NO: 24204 - RNA, 20 nt, Artificial Sequence
  HTT spacer sequence GTCN PAM
gccagaguucacuuaagauu

SEQ ID NO: 24205 - RNA, 20 nt, Artificial Sequence
  HTT spacer sequence GTCN PAM
ggguaccggcugucggcugu

SEQ ID NO: 24206 - RNA, 20 nt, Artificial Sequence
  HTT spacer sequence GTCN PAM
gcugugggcagugugaggaa

SEQ ID NO: 24207 - RNA, 20 nt, Artificial Sequence
  HTT spacer sequence GTCN PAM
uuccucacacugcccacagc

SEQ ID NO: 24208 - RNA, 20 nt, Artificial Sequence
  HTT spacer sequence GTCN PAM
gucauuccucacacugccca

SEQ ID NO: 24209 - RNA, 20 nt, Artificial Sequence
  HTT spacer sequence GTCN PAM
ucugauaagcucuugcuugu

SEQ ID NO: 24210 - RNA, 20 nt, Artificial Sequence
  HTT spacer sequence GTCN PAM
ggggaaauucaacaauaagu

SEQ ID NO: 24211 - RNA, 20 nt, Artificial Sequence
  HTT spacer sequence GTCN PAM
cccgggcuggagugcaauga

SEQ ID NO: 24212 - RNA, 20 nt, Artificial Sequence
  HTT spacer sequence GTCN PAM
cgaacuucugaccucaggug

SEQ ID NO: 24213 - RNA, 20 nt, Artificial Sequence
  HTT spacer sequence GTCN PAM
gaaguucgagaccagccugg

SEQ ID NO: 24214 - RNA, 20 nt, Artificial Sequence
  HTT spacer sequence GTCN PAM
gaacccaggcucuuucuuau

SEQ ID NO: 24215 - RNA, 20 nt, Artificial Sequence
  HTT spacer sequence GTCN PAM
uuuuacuuucuugauagugu

SEQ ID NO: 24216 - RNA, 20 nt, Artificial Sequence
  HTT spacer sequence GTCN PAM
uuugaaguguaaaaguuuuu

SEQ ID NO: 24217 - RNA, 20 nt, Artificial Sequence
  HTT spacer sequence GTCN PAM
aguuuaucuauuuugucuuu

SEQ ID NO: 24218 - RNA, 20 nt, Artificial Sequence
  HTT spacer sequence GTCN PAM
uugguugcugugcuucaagu

SEQ ID NO: 24219 - RNA, 20 nt, Artificial Sequence
  HTT spacer sequence GTCN PAM
uaucuaagaaaucauugucu

SEQ ID NO: 24220 - RNA, 20 nt, Artificial Sequence
  HTT spacer sequence GTCN PAM
aauccaaagucaaaaagguu

SEQ ID NO: 24221 - RNA, 20 nt, Artificial Sequence
  HTT spacer sequence GTCN PAM
aaaagguuuacuccuauguu

SEQ ID NO: 24222 - RNA, 20 nt, Artificial Sequence
  HTT spacer sequence GTCN PAM
gauccauuuugaguuaauuu

SEQ ID NO: 24223 - RNA, 20 nt, Artificial Sequence
  HTT spacer sequence GTCN PAM
aacuuuauucuuuuccaugu

SEQ ID NO: 24224 - RNA, 20 nt, Artificial Sequence
  HTT spacer sequence GTCN PAM
cagcacuguuuguugaagag

SEQ ID NO: 24225 - RNA, 20 nt, Artificial Sequence
  HTT spacer sequence GTCN PAM
cuucaacaaacagugcuggg

SEQ ID NO: 24226 - RNA, 20 nt, Artificial Sequence
  HTT spacer sequence GTCN PAM
uuaauuguauaaauuuauuu

SEQ ID NO: 24227 - RNA, 20 nt, Artificial Sequence
  HTT spacer sequence GTCN PAM
agaaauaaauuuauacaauu

SEQ ID NO: 24228 - RNA, 20 nt, Artificial Sequence
  HTT spacer sequence GTCN PAM
guucuaccuguuggucuuua

SEQ ID NO: 24229 - RNA, 20 nt, Artificial Sequence
  HTT spacer sequence GTCN PAM
uuaugucgauccugugccag

SEQ ID NO: 24230 - RNA, 20 nt, Artificial Sequence
  HTT spacer sequence GTCN PAM
auccugugccaguaccauac

SEQ ID NO: 24231 - RNA, 20 nt, Artificial Sequence
  HTT spacer sequence GTCN PAM
ugauuacugaaguuuguguc

SEQ ID NO: 24232 - RNA, 20 nt, Artificial Sequence
  HTT spacer sequence GTCN PAM
caguuuaaauucaugaaaug

SEQ ID NO: 24233 - RNA, 20 nt, Artificial Sequence
  HTT spacer sequence GTCN PAM
cuugcauuuccguacgaauu

SEQ ID NO: 24234 - RNA, 20 nt, Artificial Sequence
  HTT spacer sequence GTCN PAM
guuucaacaaagaagccaag

SEQ ID NO: 24235 - RNA, 20 nt, Artificial Sequence
  HTT spacer sequence GTCN PAM
uccaccuaugaacaugggca

SEQ ID NO: 24236 - RNA, 20 nt, Artificial Sequence
  HTT spacer sequence GTCN PAM
gauuguaaguauuucgggcu

SEQ ID NO: 24237 - RNA, 20 nt, Artificial Sequence
  HTT spacer sequence GTCN PAM
cugucacagcuacgcggcuc

SEQ ID NO: 24238 - RNA, 20 nt, Artificial Sequence
  HTT spacer sequence GTCN PAM
cagcuacgcggcucugccau

SEQ ID NO: 24239 - RNA, 20 nt, Artificial Sequence
  HTT spacer sequence GTCN PAM
guguuccaauagaauuuuau

SEQ ID NO: 24240 - RNA, 20 nt, Artificial Sequence
  HTT spacer sequence GTCN PAM
uuaauaaaauucuauuggaa

SEQ ID NO: 24241 - RNA, 20 nt, Artificial Sequence
  HTT spacer sequence GTCN PAM
ugagauaguauuugauuauu

SEQ ID NO: 24242 - RNA, 20 nt, Artificial Sequence
  HTT spacer sequence GTCN PAM
accauuuaaaaauguaaaaa

SEQ ID NO: 24243 - RNA, 20 nt, Artificial Sequence
  HTT spacer sequence GTCN PAM
uaucauauuuuaaccuagga

SEQ ID NO: 24244 - RNA, 20 nt, Artificial Sequence
  HTT spacer sequence GTCN PAM
caaaaaaaaaaaaaaaaaaa

SEQ ID NO: 24245 - RNA, 20 nt, Artificial Sequence
  HTT spacer sequence GTCN PAM
ugaaccugggaggcagaggu

SEQ ID NO: 24246 - RNA, 20 nt, Artificial Sequence
  HTT spacer sequence GTCN PAM
cuacuaaaaauacaaaauua

SEQ ID NO: 24247 - RNA, 20 nt, Artificial Sequence
  HTT spacer sequence GTCN PAM
ggcuggucuugaacuccuga

SEQ ID NO: 24248 - RNA, 20 nt, Artificial Sequence
  HTT spacer sequence GTCN PAM
ugaacuccugaccucaggug

SEQ ID NO: 24249 - RNA, 20 nt, Artificial Sequence
  HTT spacer sequence GTCN PAM
ggaguucaagaccagccuga

SEQ ID NO: 24250 - RNA, 20 nt, Artificial Sequence
  HTT spacer sequence GTCN PAM
gucaucuuugucuaacuucc

SEQ ID NO: 24251 - RNA, 20 nt, Artificial Sequence
  HTT spacer sequence GTCN PAM
ucuuugucuaacuuccuaag

SEQ ID NO: 24252 - RNA, 20 nt, Artificial Sequence
  HTT spacer sequence GTCN PAM
aacuuccuaagaacaaaagu

SEQ ID NO: 24253 - RNA, 20 nt, Artificial Sequence
  HTT spacer sequence GTCN PAM
ucuucccagauuuuaauaug

SEQ ID NO: 24254 - RNA, 20 nt, Artificial Sequence
  HTT spacer sequence GTCN PAM
uuuuuuguuugcuugacuga

SEQ ID NO: 24255 - RNA, 20 nt, Artificial Sequence
  HTT spacer sequence GTCN PAM
agcaaacaaaaaaugacaca

SEQ ID NO: 24256 - RNA, 20 nt, Artificial Sequence
  HTT spacer sequence GTCN PAM
uagauauuguuccauagcag

SEQ ID NO: 24257 - RNA, 20 nt, Artificial Sequence
  HTT spacer sequence GTCN PAM
ucuuuuaaaaagaaauucua

SEQ ID NO: 24258 - RNA, 20 nt, Artificial Sequence
  HTT spacer sequence GTCN PAM
cacauuuuuguggcuguaga

SEQ ID NO: 24259 - RNA, 20 nt, Artificial Sequence
  HTT spacer sequence GTCN PAM
ccagcacauucuacagccac

SEQ ID NO: 24260 - RNA, 20 nt, Artificial Sequence
  HTT spacer sequence GTCN PAM
ccauccccaucaccuccauu

SEQ ID NO: 24261 - RNA, 20 nt, Artificial Sequence
  HTT spacer sequence GTCN PAM
accacuugauaaacuaccuu

SEQ ID NO: 24262 - RNA, 20 nt, Artificial Sequence
  HTT spacer sequence GTCN PAM
uauucagacaacaaggagga

SEQ ID NO: 24263 - RNA, 20 nt, Artificial Sequence
  HTT spacer sequence GTCN PAM
gaauaagacuaaauguuuug

SEQ ID NO: 24264 - RNA, 20 nt, Artificial Sequence
  HTT spacer sequence GTCN PAM
cuaacauacauucuagcccc

SEQ ID NO: 24265 - RNA, 20 nt, Artificial Sequence
  HTT spacer sequence GTCN PAM
auagguccuugcuaucacag

SEQ ID NO: 24266 - RNA, 20 nt, Artificial Sequence
  HTT spacer sequence GTCN PAM
uugcuaucacagugaggucu

SEQ ID NO: 24267 - RNA, 20 nt, Artificial Sequence
  HTT spacer sequence GTCN PAM
cagggacagucguuugguau

SEQ ID NO: 24268 - RNA, 20 nt, Artificial Sequence
  HTT spacer sequence GTCN PAM
cugagaccucacugugauag

SEQ ID NO: 24269 - RNA, 20 nt, Artificial Sequence
  HTT spacer sequence GTCN PAM
uuugguaucauuugggaucu

SEQ ID NO: 24270 - RNA, 20 nt, Artificial Sequence
  HTT spacer sequence GTCN PAM
gcuuaugagaucccaaauga

SEQ ID NO: 24271 - RNA, 20 nt, Artificial Sequence
  HTT spacer sequence GTCN PAM
agcagagagagucugcuuau

SEQ ID NO: 24272 - RNA, 20 nt, Artificial Sequence
  HTT spacer sequence GTCN PAM
ggucaagcagagagagucug

SEQ ID NO: 24273 - RNA, 20 nt, Artificial Sequence
  HTT spacer sequence GTCN PAM
guguuuuaacagguucagug

SEQ ID NO: 24274 - RNA, 20 nt, Artificial Sequence
  HTT spacer sequence GTCN PAM
cucacugaaccuguuaaaac

SEQ ID NO: 24275 - RNA, 20 nt, Artificial Sequence
  HTT spacer sequence GTCN PAM
aagcaccuacaguggagcuu

SEQ ID NO: 24276 - RNA, 20 nt, Artificial Sequence
  HTT spacer sequence GTCN PAM
uccucccaaaugcuugcauu

SEQ ID NO: 24277 - RNA, 20 nt, Artificial Sequence
  HTT spacer sequence GTCN PAM
agguguagcugagguggccu

SEQ ID NO: 24278 - RNA, 20 nt, Artificial Sequence
  HTT spacer sequence GTCN PAM
cacuaccaauggcugggagc

SEQ ID NO: 24279 - RNA, 20 nt, Artificial Sequence
  HTT spacer sequence GTCN PAM
uuccaguucaucuaagcgag

SEQ ID NO: 24280 - RNA, 20 nt, Artificial Sequence
  HTT spacer sequence GTCN PAM
cuccccucauucgguuguuu

SEQ ID NO: 24281 - RNA, 20 nt, Artificial Sequence
  HTT spacer sequence GTCN PAM
ccuucuaaccacagcucucc

SEQ ID NO: 24282 - RNA, 20 nt, Artificial Sequence
  HTT spacer sequence GTCN PAM
aggcagaguuaacagaaggc

SEQ ID NO: 24283 - RNA, 20 nt, Artificial Sequence
  HTT spacer sequence GTCN PAM
cuaaccucucaucucucgca

SEQ ID NO: 24284 - RNA, 20 nt, Artificial Sequence
  HTT spacer sequence GTCN PAM
ugugcaccaagauaagcuug

SEQ ID NO: 24285 - RNA, 20 nt, Artificial Sequence
  HTT spacer sequence GTCN PAM
aaacaaguaguuuaauuuau

SEQ ID NO: 24286 - RNA, 20 nt, Artificial Sequence
  HTT spacer sequence GTCN PAM
caaacuacugguauuacagg

SEQ ID NO: 24287 - RNA, 20 nt, Artificial Sequence
  HTT spacer sequence GTCN PAM
ggccucaggcaauccuccca

SEQ ID NO: 24288 - RNA, 20 nt, Artificial Sequence
  HTT spacer sequence GTCN PAM
ucuggccucaggcaauccuc

SEQ ID NO: 24289 - RNA, 20 nt, Artificial Sequence
  HTT spacer sequence GTCN PAM
cuacaaaaaacuuuaaaaaa

SEQ ID NO: 24290 - RNA, 20 nt, Artificial Sequence
  HTT spacer sequence GTCN PAM
cagcuacucaggaggcugag

SEQ ID NO: 24291 - RNA, 20 nt, Artificial Sequence
  HTT spacer sequence GTCN PAM
aggaguuugaggcugcagug

SEQ ID NO: 24292 - RNA, 20 nt, Artificial Sequence
  HTT spacer sequence GTCN PAM
cacucucuugcccagguugu

SEQ ID NO: 24293 - RNA, 20 nt, Artificial Sequence
  HTT spacer sequence GTCN PAM
cuaaauauacacacacacac

SEQ ID NO: 24294 - RNA, 20 nt, Artificial Sequence
  HTT spacer sequence GTCN PAM
aagugaucuuuucaucuaaa

SEQ ID NO: 24295 - RNA, 20 nt, Artificial Sequence
  HTT spacer sequence GTCN PAM
cuuauugcuggugggaauau

SEQ ID NO: 24296 - RNA, 20 nt, Artificial Sequence
  HTT spacer sequence GTCN PAM
uaaaacugaacauaccguua

SEQ ID NO: 24297 - RNA, 20 nt, Artificial Sequence
  HTT spacer sequence GTCN PAM
uucaacaggugaaugguuaa

SEQ ID NO: 24298 - RNA, 20 nt, Artificial Sequence
  HTT spacer sequence GTCN PAM
uuuuauaaccacauucaccu

SEQ ID NO: 24299 - RNA, 20 nt, Artificial Sequence
  HTT spacer sequence GTCN PAM
uuuuuuuuuuuuuuuuuuuu

SEQ ID NO: 24300 - RNA, 20 nt, Artificial Sequence
  HTT spacer sequence GTCN PAM
ccaaaaaaaaaaaaaaaaaa

SEQ ID NO: 24301 - RNA, 20 nt, Artificial Sequence
  HTT spacer sequence GTCN PAM
ugcucuguugcccaggcugg

SEQ ID NO: 24302 - RNA, 20 nt, Artificial Sequence
  HTT spacer sequence GTCN PAM
cagucucccauguucagagu

SEQ ID NO: 24303 - RNA, 20 nt, Artificial Sequence
  HTT spacer sequence GTCN PAM
cccauguucagagugaaaca

SEQ ID NO: 24304 - RNA, 20 nt, Artificial Sequence
  HTT spacer sequence GTCN PAM
uguguguuggauuauuugga

SEQ ID NO: 24305 - RNA, 20 nt, Artificial Sequence
  HTT spacer sequence GTCN PAM
gacgugguggcucaugccug

SEQ ID NO: 24306 - RNA, 20 nt, Artificial Sequence
  HTT spacer sequence GTCN PAM
gaccugaucuugauguuuua

SEQ ID NO: 24307 - RNA, 20 nt, Artificial Sequence
  HTT spacer sequence GTCN PAM
ggaguucgagaccagccggg

SEQ ID NO: 24308 - RNA, 20 nt, Artificial Sequence
  HTT spacer sequence GTCN PAM
cgaacuccugaccucaagug

SEQ ID NO: 24309 - RNA, 20 nt, Artificial Sequence
  HTT spacer sequence GTCN PAM
agaugggguuucaucauguu

SEQ ID NO: 24310 - RNA, 20 nt, Artificial Sequence
  HTT spacer sequence GTCN PAM
cagcuacuugggaggcugag

SEQ ID NO: 24311 - RNA, 20 nt, Artificial Sequence
  HTT spacer sequence GTCN PAM
cacaggcugaagugcaaugg

SEQ ID NO: 24312 - RNA, 20 nt, Artificial Sequence
  HTT spacer sequence GTCN PAM
uacucugucacacaggcuga

SEQ ID NO: 24313 - RNA, 20 nt, Artificial Sequence
  HTT spacer sequence GTCN PAM
ggagauccagaccaucccgg

SEQ ID NO: 24314 - RNA, 20 nt, Artificial Sequence
  HTT spacer sequence GTCN PAM
ggaucuccugaccucgugau

SEQ ID NO: 24315 - RNA, 20 nt, Artificial Sequence
  HTT spacer sequence GTCN PAM
cuacuaaaaaauacaaaaaa

SEQ ID NO: 24316 - RNA, 20 nt, Artificial Sequence
  HTT spacer sequence GTCN PAM
cagcuacuugggaggcugaa

SEQ ID NO: 24317 - RNA, 20 nt, Artificial Sequence
  HTT spacer sequence GTCN PAM
cccaggcuggagugcagugg

SEQ ID NO: 24318 - RNA, 20 nt, Artificial Sequence
  HTT spacer sequence GTCN PAM
ugcucugucgcccaggcugg

SEQ ID NO: 24319 - RNA, 20 nt, Artificial Sequence
  HTT spacer sequence GTCN PAM
cgggggaaaaaaaaaaauaa

SEQ ID NO: 24320 - RNA, 20 nt, Artificial Sequence
  HTT spacer sequence GTCN PAM
uugaguuuacaugccccucc

SEQ ID NO: 24321 - RNA, 20 nt, Artificial Sequence
  HTT spacer sequence GTCN PAM
caaaaaaaaaaaaauuaaaa

SEQ ID NO: 24322 - RNA, 20 nt, Artificial Sequence
  HTT spacer sequence GTCN PAM
ggcucuguuccccaggcuag

SEQ ID NO: 24323 - RNA, 20 nt, Artificial Sequence
  HTT spacer sequence GTCN PAM
cgaacuccugaccucagaug

SEQ ID NO: 24324 - RNA, 20 nt, Artificial Sequence
  HTT spacer sequence GTCN PAM
ggaguucgagaccagccugg

SEQ ID NO: 24325 - RNA, 20 nt, Artificial Sequence
  HTT spacer sequence GTCN PAM
cuuucacuucaccuucaaaa

SEQ ID NO: 24326 - RNA, 20 nt, Artificial Sequence
  HTT spacer sequence GTCN PAM
uggcuuuucaaucacuuuug

SEQ ID NO: 24327 - RNA, 20 nt, Artificial Sequence
  HTT spacer sequence GTCN PAM
guuugaguuaucaguucauc

SEQ ID NO: 24328 - RNA, 20 nt, Artificial Sequence
  HTT spacer sequence GTCN PAM
aauaagcaaaccuggaaguu

SEQ ID NO: 24329 - RNA, 20 nt, Artificial Sequence
  HTT spacer sequence GTCN PAM
uuuaguuuaguuguuuuuag

SEQ ID NO: 24330 - RNA, 20 nt, Artificial Sequence
  HTT spacer sequence GTCN PAM
uauguuuuggaucaccccuc

SEQ ID NO: 24331 - RNA, 20 nt, Artificial Sequence
  HTT spacer sequence GTCN PAM
ucacaguuggcacuaucaaa

SEQ ID NO: 24332 - RNA, 20 nt, Artificial Sequence
  HTT spacer sequence GTCN PAM
uaauaggaggcuuauuccca

SEQ ID NO: 24333 - RNA, 20 nt, Artificial Sequence
  HTT spacer sequence GTCN PAM
ccaaauagcugggaauaagc

SEQ ID NO: 24334 - RNA, 20 nt, Artificial Sequence
  HTT spacer sequence GTCN PAM
gugugguauguugauuguag

SEQ ID NO: 24335 - RNA, 20 nt, Artificial Sequence
  HTT spacer sequence GTCN PAM
guuaacgauuuugagaacug

SEQ ID NO: 24336 - RNA, 20 nt, Artificial Sequence
  HTT spacer sequence GTCN PAM
aauaccuacucuauauauac

SEQ ID NO: 24337 - RNA, 20 nt, Artificial Sequence
  HTT spacer sequence GTCN PAM
ucuggcuuuaaaucuccucu

SEQ ID NO: 24338 - RNA, 20 nt, Artificial Sequence
  HTT spacer sequence GTCN PAM
uacagccagcauuuaaaccc

SEQ ID NO: 24339 - RNA, 20 nt, Artificial Sequence
  HTT spacer sequence GTCN PAM
ugguuggcacuucaauuucu

SEQ ID NO: 24340 - RNA, 20 nt, Artificial Sequence
  HTT spacer sequence GTCN PAM
ugguggcucauaccuauaau

SEQ ID NO: 24341 - RNA, 20 nt, Artificial Sequence
  HTT spacer sequence GTCN PAM
cuacaaaauauuuugaaaaa

SEQ ID NO: 24342 - RNA, 20 nt, Artificial Sequence
  HTT spacer sequence GTCN PAM
gcgccacucaggaggcugag

SEQ ID NO: 24343 - RNA, 20 nt, Artificial Sequence
  HTT spacer sequence GTCN PAM
cagccuccugaguggcgcgg

SEQ ID NO: 24344 - RNA, 20 nt, Artificial Sequence
  HTT spacer sequence GTCN PAM
ggaucuugcucugcugccca

SEQ ID NO: 24345 - RNA, 20 nt, Artificial Sequence
  HTT spacer sequence GTCN PAM
agcuacgcugcucacagaaa

SEQ ID NO: 24346 - RNA, 20 nt, Artificial Sequence
  HTT spacer sequence GTCN PAM
agauccccauucugcccgca

SEQ ID NO: 24347 - RNA, 20 nt, Artificial Sequence
  HTT spacer sequence GTCN PAM
agaaacacucacugaaugaa

SEQ ID NO: 24348 - RNA, 20 nt, Artificial Sequence
  HTT spacer sequence GTCN PAM
uucuugguagcugaaaguuc

SEQ ID NO: 24349 - RNA, 20 nt, Artificial Sequence
  HTT spacer sequence GTCN PAM
gacaauaugugaaaacauag

SEQ ID NO: 24350 - RNA, 20 nt, Artificial Sequence
  HTT spacer sequence GTCN PAM
gacaaugauucacacggucu

SEQ ID NO: 24351 - RNA, 20 nt, Artificial Sequence
  HTT spacer sequence GTCN PAM
gucagguaauugcacuuuga

SEQ ID NO: 24352 - RNA, 20 nt, Artificial Sequence
  HTT spacer sequence GTCN PAM
gguaauugcacuuugaacug

SEQ ID NO: 24353 - RNA, 20 nt, Artificial Sequence
  HTT spacer sequence GTCN PAM
agagaaaauaagaacuuugu

SEQ ID NO: 24354 - RNA, 20 nt, Artificial Sequence
  HTT spacer sequence GTCN PAM
uaaugggcuagaauauucuu

SEQ ID NO: 24355 - RNA, 20 nt, Artificial Sequence
  HTT spacer sequence GTCN PAM
cagcuauuuuaaauggauuc

SEQ ID NO: 24356 - RNA, 20 nt, Artificial Sequence
  HTT spacer sequence GTCN PAM
uucuucaucuuaaauggauu

SEQ ID NO: 24357 - RNA, 20 nt, Artificial Sequence
  HTT spacer sequence GTCN PAM
ggauauccuuguauauagcc

SEQ ID NO: 24358 - RNA, 20 nt, Artificial Sequence
  HTT spacer sequence GTCN PAM
ugugcuguuccuacuauugc

SEQ ID NO: 24359 - RNA, 20 nt, Artificial Sequence
  HTT spacer sequence GTCN PAM
cucuuauuugcuuuuucuug

SEQ ID NO: 24360 - RNA, 20 nt, Artificial Sequence
  HTT spacer sequence GTCN PAM
uauuguaccucugcuccuag

SEQ ID NO: 24361 - RNA, 20 nt, Artificial Sequence
  HTT spacer sequence GTCN PAM
augccccacgauccccacua

SEQ ID NO: 24362 - RNA, 20 nt, Artificial Sequence
  HTT spacer sequence GTCN PAM
gcuuuccuugcuugaucuuu

SEQ ID NO: 24363 - RNA, 20 nt, Artificial Sequence
  HTT spacer sequence GTCN PAM
aaagcaaagcagcuacaaaa

SEQ ID NO: 24364 - RNA, 20 nt, Artificial Sequence
  HTT spacer sequence GTCN PAM
gaaagauagucaaaagcaaa

SEQ ID NO: 24365 - RNA, 20 nt, Artificial Sequence
  HTT spacer sequence GTCN PAM
ccuacugagccauuggaaac

SEQ ID NO: 24366 - RNA, 20 nt, Artificial Sequence
  HTT spacer sequence GTCN PAM
gucagaaaaaaauuuuuaga

SEQ ID NO: 24367 - RNA, 20 nt, Artificial Sequence
  HTT spacer sequence GTCN PAM
gaaaaaaauuuuuagacaaa

SEQ ID NO: 24368 - RNA, 20 nt, Artificial Sequence
  HTT spacer sequence GTCN PAM
aaaaauuuuuuucugacuga

SEQ ID NO: 24369 - RNA, 20 nt, Artificial Sequence
  HTT spacer sequence GTCN PAM
guacuaaaaucaagauuauu

SEQ ID NO: 24370 - RNA, 20 nt, Artificial Sequence
  HTT spacer sequence GTCN PAM
caaaaaaaaauuaaaaaaag

SEQ ID NO: 24371 - RNA, 20 nt, Artificial Sequence
  HTT spacer sequence GTCN PAM
ggcugaucucgaacucccaa

SEQ ID NO: 24372 - RNA, 20 nt, Artificial Sequence
  HTT spacer sequence GTCN PAM
caaaaaaaaaaaaaaaacaa

SEQ ID NO: 24373 - RNA, 20 nt, Artificial Sequence
  HTT spacer sequence GTCN PAM
cgaucugucacccaggcugg

SEQ ID NO: 24374 - RNA, 20 nt, Artificial Sequence
  HTT spacer sequence GTCN PAM
cccaggcuggagugcagugg

SEQ ID NO: 24375 - RNA, 20 nt, Artificial Sequence
  HTT spacer sequence GTCN PAM
cagcuacucgccaggcugaa

SEQ ID NO: 24376 - RNA, 20 nt, Artificial Sequence
  HTT spacer sequence GTCN PAM
ugaucuccugaccucaugac

SEQ ID NO: 24377 - RNA, 20 nt, Artificial Sequence
  HTT spacer sequence GTCN PAM
ggagaucaagaccacgguga

SEQ ID NO: 24378 - RNA, 20 nt, Artificial Sequence
  HTT spacer sequence GTCN PAM
ugaggucaggagaucaagac

SEQ ID NO: 24379 - RNA, 20 nt, Artificial Sequence
  HTT spacer sequence GTCN PAM
uuuuauugugguaaaaugca

SEQ ID NO: 24380 - RNA, 20 nt, Artificial Sequence
  HTT spacer sequence GTCN PAM
auuuuaugugcauuuuacca

SEQ ID NO: 24381 - RNA, 20 nt, Artificial Sequence
  HTT spacer sequence GTCN PAM
uaaccauuuuuagggguaca

SEQ ID NO: 24382 - RNA, 20 nt, Artificial Sequence
  HTT spacer sequence GTCN PAM
aaacugaacaucugucuuca

SEQ ID NO: 24383 - RNA, 20 nt, Artificial Sequence
  HTT spacer sequence GTCN PAM
ucauuaaacucccuaucauc

SEQ ID NO: 24384 - RNA, 20 nt, Artificial Sequence
  HTT spacer sequence GTCN PAM
cuuucuacuuucugucugua

SEQ ID NO: 24385 - RNA, 20 nt, Artificial Sequence
  HTT spacer sequence GTCN PAM
guaugaguguaacugcucug

SEQ ID NO: 24386 - RNA, 20 nt, Artificial Sequence
  HTT spacer sequence GTCN PAM
ccagagcaguuacacucaua

SEQ ID NO: 24387 - RNA, 20 nt, Artificial Sequence
  HTT spacer sequence GTCN PAM
aauuuguggaaauguugugg

SEQ ID NO: 24388 - RNA, 20 nt, Artificial Sequence
  HTT spacer sequence GTCN PAM
ugaaaauaaaaauauaaaaa

SEQ ID NO: 24389 - RNA, 20 nt, Artificial Sequence
  HTT spacer sequence GTCN PAM
cccagcuuacacagguagca

SEQ ID NO: 24390 - RNA, 20 nt, Artificial Sequence
  HTT spacer sequence GTCN PAM
caaaaaaaaaaaaguaaaga

SEQ ID NO: 24391 - RNA, 20 nt, Artificial Sequence
  HTT spacer sequence GTCN PAM
ugcucuguugcccaggcuag

SEQ ID NO: 24392 - RNA, 20 nt, Artificial Sequence
  HTT spacer sequence GTCN PAM
cagcuacuugggaggcuggg

SEQ ID NO: 24393 - RNA, 20 nt, Artificial Sequence
  HTT spacer sequence GTCN PAM
ugaucuccugaccucgugau

SEQ ID NO: 24394 - RNA, 20 nt, Artificial Sequence
  HTT spacer sequence GTCN PAM
ggagaucaagaccauccugg

SEQ ID NO: 24395 - RNA, 20 nt, Artificial Sequence
  HTT spacer sequence GTCN PAM
uuucacaaaaaaaguaaaga

SEQ ID NO: 24396 - RNA, 20 nt, Artificial Sequence
  HTT spacer sequence GTCN PAM
uuguucaucugaucuccacc

SEQ ID NO: 24397 - RNA, 20 nt, Artificial Sequence
  HTT spacer sequence GTCN PAM
cagagaacauaauuucucuc

SEQ ID NO: 24398 - RNA, 20 nt, Artificial Sequence
  HTT spacer sequence GTCN PAM
auaagcuuucagagagaaau

SEQ ID NO: 24399 - RNA, 20 nt, Artificial Sequence
  HTT spacer sequence GTCN PAM
ggcuuuauucuugucauuuu

SEQ ID NO: 24400 - RNA, 20 nt, Artificial Sequence
  HTT spacer sequence GTCN PAM
uuuugucuuuugauaauuuu

SEQ ID NO: 24401 - RNA, 20 nt, Artificial Sequence
  HTT spacer sequence GTCN PAM
uuugauaauuuucaaaugga

SEQ ID NO: 24402 - RNA, 20 nt, Artificial Sequence
  HTT spacer sequence GTCN PAM
caacauacuuuacuaauaua

SEQ ID NO: 24403 - RNA, 20 nt, Artificial Sequence
  HTT spacer sequence GTCN PAM
gucucuuguuuuuauggagu

SEQ ID NO: 24404 - RNA, 20 nt, Artificial Sequence
  HTT spacer sequence GTCN PAM
cuuguuuuuauggaguaaug

SEQ ID NO: 24405 - RNA, 20 nt, Artificial Sequence
  HTT spacer sequence GTCN PAM
gagagguuauucuugguuuc

SEQ ID NO: 24406 - RNA, 20 nt, Artificial Sequence
  HTT spacer sequence GTCN PAM
agcacaaaagcuauaaaaaa

SEQ ID NO: 24407 - RNA, 20 nt, Artificial Sequence
  HTT spacer sequence GTCN PAM
cuaaugagguuauauaaaug

SEQ ID NO: 24408 - RNA, 20 nt, Artificial Sequence
  HTT spacer sequence GTCN PAM
gaagcugccauuuauauaac

SEQ ID NO: 24409 - RNA, 20 nt, Artificial Sequence
  HTT spacer sequence GTCN PAM
uuuaaaacuucauguauauu

SEQ ID NO: 24410 - RNA, 20 nt, Artificial Sequence
  HTT spacer sequence GTCN PAM
gcuuuaagcucucuaaagug

SEQ ID NO: 24411 - RNA, 20 nt, Artificial Sequence
  HTT spacer sequence GTCN PAM
aaguuacugguuccuaagua

SEQ ID NO: 24412 - RNA, 20 nt, Artificial Sequence
  HTT spacer sequence GTCN PAM
uuuuucccaaacauacuucu

SEQ ID NO: 24413 - RNA, 20 nt, Artificial Sequence
  HTT spacer sequence GTCN PAM
cuaccuacucaaacagaaug

SEQ ID NO: 24414 - RNA, 20 nt, Artificial Sequence
  HTT spacer sequence GTCN PAM
ccuauaucuuucagaaacau

SEQ ID NO: 24415 - RNA, 20 nt, Artificial Sequence
  HTT spacer sequence GTCN PAM
agaguuugagaccagcugga

SEQ ID NO: 24416 - RNA, 20 nt, Artificial Sequence
  HTT spacer sequence GTCN PAM
caaacucuugaccucaggug

SEQ ID NO: 24417 - RNA, 20 nt, Artificial Sequence
  HTT spacer sequence GTCN PAM
agcuggucucaaacucuuga

SEQ ID NO: 24418 - RNA, 20 nt, Artificial Sequence
  HTT spacer sequence GTCN PAM
cagcuacuugggaggcugag

SEQ ID NO: 24419 - RNA, 20 nt, Artificial Sequence
  HTT spacer sequence GTCN PAM
cccaggcuggaaugcagugg

SEQ ID NO: 24420 - RNA, 20 nt, Artificial Sequence
  HTT spacer sequence GTCN PAM
caagaaaaaagagaaaaaag

SEQ ID NO: 24421 - RNA, 20 nt, Artificial Sequence
  HTT spacer sequence GTCN PAM
caccauauuaguguugauuu

SEQ ID NO: 24422 - RNA, 20 nt, Artificial Sequence
  HTT spacer sequence GTCN PAM
cauacauuaagucucaccau

SEQ ID NO: 24423 - RNA, 20 nt, Artificial Sequence
  HTT spacer sequence GTCN PAM
gagaaauguaucauuucccu

SEQ ID NO: 24424 - RNA, 20 nt, Artificial Sequence
  HTT spacer sequence GTCN PAM
aaauccaccuucaacaaaau

SEQ ID NO: 24425 - RNA, 20 nt, Artificial Sequence
  HTT spacer sequence GTCN PAM
auacuuuccccaaguucaau

SEQ ID NO: 24426 - RNA, 20 nt, Artificial Sequence
  HTT spacer sequence GTCN PAM
accugucggcaccuuguucu

SEQ ID NO: 24427 - RNA, 20 nt, Artificial Sequence
  HTT spacer sequence GTCN PAM
acaguguuuuucuuaacgau

SEQ ID NO: 24428 - RNA, 20 nt, Artificial Sequence
  HTT spacer sequence GTCN PAM
gcaccuuguucuccgacucc

SEQ ID NO: 24429 - RNA, 20 nt, Artificial Sequence
  HTT spacer sequence GTCN PAM
gagaacaaggugccgacagg

SEQ ID NO: 24430 - RNA, 20 nt, Artificial Sequence
  HTT spacer sequence GTCN PAM
caguucuggaggcugggagu

SEQ ID NO: 24431 - RNA, 20 nt, Artificial Sequence
  HTT spacer sequence GTCN PAM
guaugugguauuuuguuaua

SEQ ID NO: 24432 - RNA, 20 nt, Artificial Sequence
  HTT spacer sequence GTCN PAM
uaaucagcuugaguuucuau

SEQ ID NO: 24433 - RNA, 20 nt, Artificial Sequence
  HTT spacer sequence GTCN PAM
acugauuacuaguguccuaa

SEQ ID NO: 24434 - RNA, 20 nt, Artificial Sequence
  HTT spacer sequence GTCN PAM
aauuggcaaacauuaagaau

SEQ ID NO: 24435 - RNA, 20 nt, Artificial Sequence
  HTT spacer sequence GTCN PAM
gaggugauacaaccuucuaa

SEQ ID NO: 24436 - RNA, 20 nt, Artificial Sequence
  HTT spacer sequence GTCN PAM
gaccuagcaguuuuaccucu

SEQ ID NO: 24437 - RNA, 20 nt, Artificial Sequence
  HTT spacer sequence GTCN PAM
gacauauaauaaucuaaagc

SEQ ID NO: 24438 - RNA, 20 nt, Artificial Sequence
  HTT spacer sequence GTCN PAM
ugcacuguccgccugggcca

SEQ ID NO: 24439 - RNA, 20 nt, Artificial Sequence
  HTT spacer sequence GTCN PAM
gccugggccagagugcaaug

SEQ ID NO: 24440 - RNA, 20 nt, Artificial Sequence
  HTT spacer sequence GTCN PAM
ggccaacacagugaaacccc

SEQ ID NO: 24441 - RNA, 20 nt, Artificial Sequence
  HTT spacer sequence GTCN PAM
cgaacuccugaccucaugau

SEQ ID NO: 24442 - RNA, 20 nt, Artificial Sequence
  HTT spacer sequence GTCN PAM
ggaguucgagaccagucugg

SEQ ID NO: 24443 - RNA, 20 nt, Artificial Sequence
  HTT spacer sequence GTCN PAM
cuaaaaaaaauuuuuuuaau

SEQ ID NO: 24444 - RNA, 20 nt, Artificial Sequence
  HTT spacer sequence GTCN PAM
cccaggcaggaugcaguugc

SEQ ID NO: 24445 - RNA, 20 nt, Artificial Sequence
  HTT spacer sequence GTCN PAM
cccagguacucaaaaggcug

SEQ ID NO: 24446 - RNA, 20 nt, Artificial Sequence
  HTT spacer sequence GTCN PAM
agaauuccugggcccaagug

SEQ ID NO: 24447 - RNA, 20 nt, Artificial Sequence
  HTT spacer sequence GTCN PAM
gaagugguggcucaugccug

SEQ ID NO: 24448 - RNA, 20 nt, Artificial Sequence
  HTT spacer sequence GTCN PAM
caaauauaaauaucuauugg

SEQ ID NO: 24449 - RNA, 20 nt, Artificial Sequence
  HTT spacer sequence GTCN PAM
uuguuauucuaucuuagcca

SEQ ID NO: 24450 - RNA, 20 nt, Artificial Sequence
  HTT spacer sequence GTCN PAM
uggcaagaggaaaaacugag

SEQ ID NO: 24451 - RNA, 20 nt, Artificial Sequence
  HTT spacer sequence GTCN PAM
ccucucaguuuuuccucuug

SEQ ID NO: 24452 - RNA, 20 nt, Artificial Sequence
  HTT spacer sequence GTCN PAM
ccggagcucccucugcagcu

SEQ ID NO: 24453 - RNA, 20 nt, Artificial Sequence
  HTT spacer sequence GTCN PAM
uguguguagcugaguacuga

SEQ ID NO: 24454 - RNA, 20 nt, Artificial Sequence
  HTT spacer sequence GTCN PAM
guacucagcuacacacauga

SEQ ID NO: 24455 - RNA, 20 nt, Artificial Sequence
  HTT spacer sequence GTCN PAM
uuuccgcacaagcaagugcu

SEQ ID NO: 24456 - RNA, 20 nt, Artificial Sequence
  HTT spacer sequence GTCN PAM
cacagggccaggaagaauuu

SEQ ID NO: 24457 - RNA, 20 nt, Artificial Sequence
  HTT spacer sequence GTCN PAM
ggggcuaggugggcaaaccc

SEQ ID NO: 24458 - RNA, 20 nt, Artificial Sequence
  HTT spacer sequence GTCN PAM
gaguaacgaaacuuagucug

SEQ ID NO: 24459 - RNA, 20 nt, Artificial Sequence
  HTT spacer sequence GTCN PAM
uacaauucacuucuacgugu

SEQ ID NO: 24460 - RNA, 20 nt, Artificial Sequence
  HTT spacer sequence GTCN PAM
auuucugcucuuccagccuu

SEQ ID NO: 24461 - RNA, 20 nt, Artificial Sequence
  HTT spacer sequence GTCN PAM
uaaucccuggagccuguaaa

SEQ ID NO: 24462 - RNA, 20 nt, Artificial Sequence
  HTT spacer sequence GTCN PAM
uaggacaauaguggagggaa

SEQ ID NO: 24463 - RNA, 20 nt, Artificial Sequence
  HTT spacer sequence GTCN PAM
uaugacccugccaaaucccc

SEQ ID NO: 24464 - RNA, 20 nt, Artificial Sequence
  HTT spacer sequence GTCN PAM
gcagauaaacauguaaacaa

SEQ ID NO: 24465 - RNA, 20 nt, Artificial Sequence
  HTT spacer sequence GTCN PAM
cugguuuuccuaggcagagg

SEQ ID NO: 24466 - RNA, 20 nt, Artificial Sequence
  HTT spacer sequence GTCN PAM
cuggguacuugagauuaggg

SEQ ID NO: 24467 - RNA, 20 nt, Artificial Sequence
  HTT spacer sequence GTCN PAM
ucaccacucccuaaucucaa

SEQ ID NO: 24468 - RNA, 20 nt, Artificial Sequence
  HTT spacer sequence GTCN PAM
acuaaggguuaaauggauua

SEQ ID NO: 24469 - RNA, 20 nt, Artificial Sequence
  HTT spacer sequence GTCN PAM
uaugucuacuucuuucuacg

SEQ ID NO: 24470 - RNA, 20 nt, Artificial Sequence
  HTT spacer sequence GTCN PAM
acuucuuucuacgcagacac

SEQ ID NO: 24471 - RNA, 20 nt, Artificial Sequence
  HTT spacer sequence GTCN PAM
gcguagaaagaaguagacau

SEQ ID NO: 24472 - RNA, 20 nt, Artificial Sequence
  HTT spacer sequence GTCN PAM
aauagaaaaggaggaaaugu

SEQ ID NO: 24473 - RNA, 20 nt, Artificial Sequence
  HTT spacer sequence GTCN PAM
ucauggacuguucucaauga

SEQ ID NO: 24474 - RNA, 20 nt, Artificial Sequence
  HTT spacer sequence GTCN PAM
augaugacgguggcaguuuu

SEQ ID NO: 24475 - RNA, 20 nt, Artificial Sequence
  HTT spacer sequence GTCN PAM
gggagguuggggggcgccuc

SEQ ID NO: 24476 - RNA, 20 nt, Artificial Sequence
  HTT spacer sequence GTCN PAM
gggagguggggggcagcccc

SEQ ID NO: 24477 - RNA, 20 nt, Artificial Sequence
  HTT spacer sequence GTCN PAM
gggagguggugggcagcccc

SEQ ID NO: 24478 - RNA, 20 nt, Artificial Sequence
  HTT spacer sequence GTCN PAM
gggagguggggggcagcccc

SEQ ID NO: 24479 - RNA, 20 nt, Artificial Sequence
  HTT spacer sequence GTCN PAM
gggagguggggggcagcccc

SEQ ID NO: 24480 - RNA, 20 nt, Artificial Sequence
  HTT spacer sequence GTCN PAM
gggagguggggggcagcccc

SEQ ID NO: 24481 - RNA, 20 nt, Artificial Sequence
  HTT spacer sequence GTCN PAM
gggaagugaggagccccucc

SEQ ID NO: 24482 - RNA, 20 nt, Artificial Sequence
  HTT spacer sequence GTCN PAM
gagaagugaggagccccucc

SEQ ID NO: 24483 - RNA, 20 nt, Artificial Sequence
  HTT spacer sequence GTCN PAM
gagacgcuccucaccuccca

SEQ ID NO: 24484 - RNA, 20 nt, Artificial Sequence
  HTT spacer sequence GTCN PAM
cugaccagccgccccgucug

SEQ ID NO: 24485 - RNA, 20 nt, Artificial Sequence
  HTT spacer sequence GTCN PAM
gggaggugaggagcgucucu

SEQ ID NO: 24486 - RNA, 20 nt, Artificial Sequence
  HTT spacer sequence GTCN PAM
cugccccacugccaccccgu

SEQ ID NO: 24487 - RNA, 20 nt, Artificial Sequence
  HTT spacer sequence GTCN PAM
gggaacuuaagaaugucucu

SEQ ID NO: 24488 - RNA, 20 nt, Artificial Sequence
  HTT spacer sequence GTCN PAM
cggccgggcagaggugcucu

SEQ ID NO: 24489 - RNA, 20 nt, Artificial Sequence
  HTT spacer sequence GTCN PAM
gagaugugaagagcaccucu

SEQ ID NO: 24490 - RNA, 20 nt, Artificial Sequence
  HTT spacer sequence GTCN PAM
gggaaguggggagcaccucu

SEQ ID NO: 24491 - RNA, 20 nt, Artificial Sequence
  HTT spacer sequence GTCN PAM
ucccaucuaggaagugagga

SEQ ID NO: 24492 - RNA, 20 nt, Artificial Sequence
  HTT spacer sequence GTCN PAM
gggaagugaggagcgccucu

SEQ ID NO: 24493 - RNA, 20 nt, Artificial Sequence
  HTT spacer sequence GTCN PAM
gggaugugaggagccccucu

SEQ ID NO: 24494 - RNA, 20 nt, Artificial Sequence
  HTT spacer sequence GTCN PAM
aggaagugaggagcguuucu

SEQ ID NO: 24495 - RNA, 20 nt, Artificial Sequence
  HTT spacer sequence GTCN PAM
cuacaaccuucaccucccag

SEQ ID NO: 24496 - RNA, 20 nt, Artificial Sequence
  HTT spacer sequence GTCN PAM
cgcucacucagugcucagug

SEQ ID NO: 24497 - RNA, 20 nt, Artificial Sequence
  HTT spacer sequence GTCN PAM
gcaaucccggcaccucggga

SEQ ID NO: 24498 - RNA, 20 nt, Artificial Sequence
  HTT spacer sequence GTCN PAM
ggagcuggagaccagcccgg

SEQ ID NO: 24499 - RNA, 20 nt, Artificial Sequence
  HTT spacer sequence GTCN PAM
ccagcuccugacugcaagug

SEQ ID NO: 24500 - RNA, 20 nt, Artificial Sequence
  HTT spacer sequence GTCN PAM
ccaccaaaaaacacgaaaac

SEQ ID NO: 24501 - RNA, 20 nt, Artificial Sequence
  HTT spacer sequence GTCN PAM
gacauggcggugcgugccug

SEQ ID NO: 24502 - RNA, 20 nt, Artificial Sequence
  HTT spacer sequence GTCN PAM
gacugguuuucguguuuuuu

SEQ ID NO: 24503 - RNA, 20 nt, Artificial Sequence
  HTT spacer sequence GTCN PAM
agccuuggcucggcaucaga

SEQ ID NO: 24504 - RNA, 20 nt, Artificial Sequence
  HTT spacer sequence GTCN PAM
cccucugaugccgagccaag

SEQ ID NO: 24505 - RNA, 20 nt, Artificial Sequence
  HTT spacer sequence GTCN PAM
aaaauuaguaucacuaaacu

SEQ ID NO: 24506 - RNA, 20 nt, Artificial Sequence
  HTT spacer sequence GTCN PAM
aaaaggacauuacauguaaa

SEQ ID NO: 24507 - RNA, 20 nt, Artificial Sequence
  HTT spacer sequence GTCN PAM
uuuuugacauaguuagguug

SEQ ID NO: 24508 - RNA, 20 nt, Artificial Sequence
  HTT spacer sequence GTCN PAM
uacuuuuccauucaaucuga

SEQ ID NO: 24509 - RNA, 20 nt, Artificial Sequence
  HTT spacer sequence GTCN PAM
agcuugcaucuaauucuugu

SEQ ID NO: 24510 - RNA, 20 nt, Artificial Sequence
  HTT spacer sequence GTCN PAM
gauauuaacagaaccagucu

SEQ ID NO: 24511 - RNA, 20 nt, Artificial Sequence
  HTT spacer sequence GTCN PAM
uuucauaaugaugaagggga

SEQ ID NO: 24512 - RNA, 20 nt, Artificial Sequence
  HTT spacer sequence GTCN PAM
ggugcauaaacauuucagcu

SEQ ID NO: 24513 - RNA, 20 nt, Artificial Sequence
  HTT spacer sequence GTCN PAM
ggcuuugcuucauguauuuu

SEQ ID NO: 24514 - RNA, 20 nt, Artificial Sequence
  HTT spacer sequence GTCN PAM
guuucuacuuguaguucugu

SEQ ID NO: 24515 - RNA, 20 nt, Artificial Sequence
  HTT spacer sequence GTCN PAM
aguguucuagauccagauau

SEQ ID NO: 24516 - RNA, 20 nt, Artificial Sequence
  HTT spacer sequence GTCN PAM
ccugugcaaccucauuggca

SEQ ID NO: 24517 - RNA, 20 nt, Artificial Sequence
  HTT spacer sequence GTCN PAM
uguaaaugccaaugagguug

SEQ ID NO: 24518 - RNA, 20 nt, Artificial Sequence
  HTT spacer sequence GTCN PAM
cuucugcuggugcugggugg

SEQ ID NO: 24519 - RNA, 20 nt, Artificial Sequence
  HTT spacer sequence GTCN PAM
cuaaauuaaaagcauucaaa

SEQ ID NO: 24520 - RNA, 20 nt, Artificial Sequence
  HTT spacer sequence GTCN PAM
gaaaacauacucugaauaau

SEQ ID NO: 24521 - RNA, 20 nt, Artificial Sequence
  HTT spacer sequence GTCN PAM
gaagugaagucaaaagggaa

SEQ ID NO: 24522 - RNA, 20 nt, Artificial Sequence
  HTT spacer sequence GTCN PAM
aaagggaaauuugaaagucu

SEQ ID NO: 24523 - RNA, 20 nt, Artificial Sequence
  HTT spacer sequence GTCN PAM
uuuggauugacugauauaaa

SEQ ID NO: 24524 - RNA, 20 nt, Artificial Sequence
  HTT spacer sequence GTCN PAM
auccaaaagacuuucaaauu

SEQ ID NO: 24525 - RNA, 20 nt, Artificial Sequence
  HTT spacer sequence GTCN PAM
uugauuugaaaucuuucuuu

SEQ ID NO: 24526 - RNA, 20 nt, Artificial Sequence
  HTT spacer sequence GTCN PAM
uuuucaaguuuccaaaggua

SEQ ID NO: 24527 - RNA, 20 nt, Artificial Sequence
  HTT spacer sequence GTCN PAM
caaacaauccaccugccucg

SEQ ID NO: 24528 - RNA, 20 nt, Artificial Sequence
  HTT spacer sequence GTCN PAM
ucaacugccagucucaaaca

SEQ ID NO: 24529 - RNA, 20 nt, Artificial Sequence
  HTT spacer sequence GTCN PAM
cccuaggcugcccaggcugg

SEQ ID NO: 24530 - RNA, 20 nt, Artificial Sequence
  HTT spacer sequence GTCN PAM
cagcuaaccaggagucuaag

SEQ ID NO: 24531 - RNA, 20 nt, Artificial Sequence
  HTT spacer sequence GTCN PAM
aaggugggaggauugcuuga

SEQ ID NO: 24532 - RNA, 20 nt, Artificial Sequence
  HTT spacer sequence GTCN PAM
gggagguugaggcugcagug

SEQ ID NO: 24533 - RNA, 20 nt, Artificial Sequence
  HTT spacer sequence GTCN PAM
cauucuguugcccaggaugg

SEQ ID NO: 24534 - RNA, 20 nt, Artificial Sequence
  HTT spacer sequence GTCN PAM
caaaaacaaaaacaguuacu

SEQ ID NO: 24535 - RNA, 20 nt, Artificial Sequence
  HTT spacer sequence GTCN PAM
auucuucuaguaacuguuuu

SEQ ID NO: 24536 - RNA, 20 nt, Artificial Sequence
  HTT spacer sequence GTCN PAM
guaaaauagaaaacaaaaau

SEQ ID NO: 24537 - RNA, 20 nt, Artificial Sequence
  HTT spacer sequence GTCN PAM
caaauuagcaauaucaggaa

SEQ ID NO: 24538 - RNA, 20 nt, Artificial Sequence
  HTT spacer sequence GTCN PAM
ucucccucauuccugauauu

SEQ ID NO: 24539 - RNA, 20 nt, Artificial Sequence
  HTT spacer sequence GTCN PAM
uuuuaauaucuauauaaucu

SEQ ID NO: 24540 - RNA, 20 nt, Artificial Sequence
  HTT spacer sequence GTCN PAM
accucggccucccaaggugc

SEQ ID NO: 24541 - RNA, 20 nt, Artificial Sequence
  HTT spacer sequence GTCN PAM
ggaguuugggaccagccugg

SEQ ID NO: 24542 - RNA, 20 nt, Artificial Sequence
  HTT spacer sequence GTCN PAM
caaacuccugaccucaggug

SEQ ID NO: 24543 - RNA, 20 nt, Artificial Sequence
  HTT spacer sequence GTCN PAM
cuacuaaaaauacaaaaauu

SEQ ID NO: 24544 - RNA, 20 nt, Artificial Sequence
  HTT spacer sequence GTCN PAM
uggugcugugugccuguaau

SEQ ID NO: 24545 - RNA, 20 nt, Artificial Sequence
  HTT spacer sequence GTCN PAM
cccaggcuggagugcaacgg

SEQ ID NO: 24546 - RNA, 20 nt, Artificial Sequence
  HTT spacer sequence GTCN PAM
ugcucugucacccaggcugg

SEQ ID NO: 24547 - RNA, 20 nt, Artificial Sequence
  HTT spacer sequence GTCN PAM
uuuuuauuuauuuauuuguu

SEQ ID NO: 24548 - RNA, 20 nt, Artificial Sequence
  HTT spacer sequence GTCN PAM
aauuuauuggcauaaaguug

SEQ ID NO: 24549 - RNA, 20 nt, Artificial Sequence
  HTT spacer sequence GTCN PAM
uucaaggaacucauccauuu

SEQ ID NO: 24550 - RNA, 20 nt, Artificial Sequence
  HTT spacer sequence GTCN PAM
aaucacagguaaagguuuuc

SEQ ID NO: 24551 - RNA, 20 nt, Artificial Sequence
  HTT spacer sequence GTCN PAM
gaauugagauauacuguaaa

SEQ ID NO: 24552 - RNA, 20 nt, Artificial Sequence
  HTT spacer sequence GTCN PAM
gcuaggaaauauaaaagugu

SEQ ID NO: 24553 - RNA, 20 nt, Artificial Sequence
  HTT spacer sequence GTCN PAM
acagaaacagaaugugagcu

SEQ ID NO: 24554 - RNA, 20 nt, Artificial Sequence
  HTT spacer sequence GTCN PAM
uugaaaugauagaucauuca

SEQ ID NO: 24555 - RNA, 20 nt, Artificial Sequence
  HTT spacer sequence GTCN PAM
guauuccacauagauaaggu

SEQ ID NO: 24556 - RNA, 20 nt, Artificial Sequence
  HTT spacer sequence GTCN PAM
gaaauacugcuaaguggcau

SEQ ID NO: 24557 - RNA, 20 nt, Artificial Sequence
  HTT spacer sequence GTCN PAM
acaucaguaaugaucaacaa

SEQ ID NO: 24558 - RNA, 20 nt, Artificial Sequence
  HTT spacer sequence GTCN PAM
cuuucucuuuaucucuaggu

SEQ ID NO: 24559 - RNA, 20 nt, Artificial Sequence
  HTT spacer sequence GTCN PAM
guuucauguacauggcucau

SEQ ID NO: 24560 - RNA, 20 nt, Artificial Sequence
  HTT spacer sequence GTCN PAM
aaacaaagccaagagagagc

SEQ ID NO: 24561 - RNA, 20 nt, Artificial Sequence
  HTT spacer sequence GTCN PAM
caaaaacuggaguuuguuua

SEQ ID NO: 24562 - RNA, 20 nt, Artificial Sequence
  HTT spacer sequence GTCN PAM
cgcacaacaaaaacacaauc

SEQ ID NO: 24563 - RNA, 20 nt, Artificial Sequence
  HTT spacer sequence GTCN PAM
gauuguguuuuuguugugcg

SEQ ID NO: 24564 - RNA, 20 nt, Artificial Sequence
  HTT spacer sequence GTCN PAM
aucucuccugccccuuuuua

SEQ ID NO: 24565 - RNA, 20 nt, Artificial Sequence
  HTT spacer sequence GTCN PAM
aggauugaaguaucugaagu

SEQ ID NO: 24566 - RNA, 20 nt, Artificial Sequence
  HTT spacer sequence GTCN PAM
cacacuaaauuaggaugaua

SEQ ID NO: 24567 - RNA, 20 nt, Artificial Sequence
  HTT spacer sequence GTCN PAM
agacuuuauucagauuuucu

SEQ ID NO: 24568 - RNA, 20 nt, Artificial Sequence
  HTT spacer sequence GTCN PAM
ggacuuaaguuaauagcaua

SEQ ID NO: 24569 - RNA, 20 nt, Artificial Sequence
  HTT spacer sequence GTCN PAM
uuuuucuguuccagaauucc

SEQ ID NO: 24570 - RNA, 20 nt, Artificial Sequence
  HTT spacer sequence GTCN PAM
ugcauggaauucuggaacag

SEQ ID NO: 24571 - RNA, 20 nt, Artificial Sequence
  HTT spacer sequence GTCN PAM
ugucaccuuaggcuccucuu

SEQ ID NO: 24572 - RNA, 20 nt, Artificial Sequence
  HTT spacer sequence GTCN PAM
ccuuaggcuccucuugacag

SEQ ID NO: 24573 - RNA, 20 nt, Artificial Sequence
  HTT spacer sequence GTCN PAM
agaggagccuaaggugacau

SEQ ID NO: 24574 - RNA, 20 nt, Artificial Sequence
  HTT spacer sequence GTCN PAM
ucacugcacagcagaaaaag

SEQ ID NO: 24575 - RNA, 20 nt, Artificial Sequence
  HTT spacer sequence GTCN PAM
gaugucaggaugguggcuga

SEQ ID NO: 24576 - RNA, 20 nt, Artificial Sequence
  HTT spacer sequence GTCN PAM
ggaugguggcugacgaaugc

SEQ ID NO: 24577 - RNA, 20 nt, Artificial Sequence
  HTT spacer sequence GTCN PAM
gccaccauccugacaucuga

SEQ ID NO: 24578 - RNA, 20 nt, Artificial Sequence
  HTT spacer sequence GTCN PAM
cugaggaugucugcacuuuu

SEQ ID NO: 24579 - RNA, 20 nt, Artificial Sequence
  HTT spacer sequence GTCN PAM
gcacuuuuuuccuuucugau

SEQ ID NO: 24580 - RNA, 20 nt, Artificial Sequence
  HTT spacer sequence GTCN PAM
uguaugguuugcaggugcuc

SEQ ID NO: 24581 - RNA, 20 nt, Artificial Sequence
  HTT spacer sequence GTCN PAM
gaaggcgcuauguugacaau

SEQ ID NO: 24582 - RNA, 20 nt, Artificial Sequence
  HTT spacer sequence GTCN PAM
acauagcgccuucugaccgg

SEQ ID NO: 24583 - RNA, 20 nt, Artificial Sequence
  HTT spacer sequence GTCN PAM
augaagggaaccgaugguag

SEQ ID NO: 24584 - RNA, 20 nt, Artificial Sequence
  HTT spacer sequence GTCN PAM
cuacaggcaccagagaagcc

SEQ ID NO: 24585 - RNA, 20 nt, Artificial Sequence
  HTT spacer sequence GTCN PAM
caguuuucuuaaccauaaaa

SEQ ID NO: 24586 - RNA, 20 nt, Artificial Sequence
  HTT spacer sequence GTCN PAM
guguaugugugaggauuaaa

SEQ ID NO: 24587 - RNA, 20 nt, Artificial Sequence
  HTT spacer sequence GTCN PAM
ucacacauacacaauuuaau

SEQ ID NO: 24588 - RNA, 20 nt, Artificial Sequence
  HTT spacer sequence GTCN PAM
uuauuaauaagaacacuucu

SEQ ID NO: 24589 - RNA, 20 nt, Artificial Sequence
  HTT spacer sequence GTCN PAM
ggacgcuggcuucucuggag

SEQ ID NO: 24590 - RNA, 20 nt, Artificial Sequence
  HTT spacer sequence GTCN PAM
ugaccacagaaagcgugauu

SEQ ID NO: 24591 - RNA, 20 nt, Artificial Sequence
  HTT spacer sequence GTCN PAM
ugucccuagaguggucacug

SEQ ID NO: 24592 - RNA, 20 nt, Artificial Sequence
  HTT spacer sequence GTCN PAM
cuagaguggucacugucuuc

SEQ ID NO: 24593 - RNA, 20 nt, Artificial Sequence
  HTT spacer sequence GTCN PAM
cugucuucucucuccgcuug

SEQ ID NO: 24594 - RNA, 20 nt, Artificial Sequence
  HTT spacer sequence GTCN PAM
ucucucuccgcuugcaauuc

SEQ ID NO: 24595 - RNA, 20 nt, Artificial Sequence
  HTT spacer sequence GTCN PAM
cugcauaagugagaugcgag

SEQ ID NO: 24596 - RNA, 20 nt, Artificial Sequence
  HTT spacer sequence GTCN PAM
ugccagugagaauaaaagaa

SEQ ID NO: 24597 - RNA, 20 nt, Artificial Sequence
  HTT spacer sequence GTCN PAM
gucuuugcaugagacagggu

SEQ ID NO: 24598 - RNA, 20 nt, Artificial Sequence
  HTT spacer sequence GTCN PAM
uugcaugagacagggucucg

SEQ ID NO: 24599 - RNA, 20 nt, Artificial Sequence
  HTT spacer sequence GTCN PAM
caugcaaagacagaccgccc

SEQ ID NO: 24600 - RNA, 20 nt, Artificial Sequence
  HTT spacer sequence GTCN PAM
cgcucagucacccaggcugg

SEQ ID NO: 24601 - RNA, 20 nt, Artificial Sequence
  HTT spacer sequence GTCN PAM
cccaggcuggagugcagugg

SEQ ID NO: 24602 - RNA, 20 nt, Artificial Sequence
  HTT spacer sequence GTCN PAM
cagcuacucaaggggccaag

SEQ ID NO: 24603 - RNA, 20 nt, Artificial Sequence
  HTT spacer sequence GTCN PAM
ugaacgccugggcucaagug

SEQ ID NO: 24604 - RNA, 20 nt, Artificial Sequence
  HTT spacer sequence GTCN PAM
gaaaaucuaaaaagagggcu

SEQ ID NO: 24605 - RNA, 20 nt, Artificial Sequence
  HTT spacer sequence GTCN PAM
cauuugccaugaaccaaggc

SEQ ID NO: 24606 - RNA, 20 nt, Artificial Sequence
  HTT spacer sequence GTCN PAM
uuuaauguguaaguauuguu

SEQ ID NO: 24607 - RNA, 20 nt, Artificial Sequence
  HTT spacer sequence GTCN PAM
agcaauuccuggaaaaaaaa

SEQ ID NO: 24608 - RNA, 20 nt, Artificial Sequence
  HTT spacer sequence GTCN PAM
gaggacuguaggccauggcc

SEQ ID NO: 24609 - RNA, 20 nt, Artificial Sequence
  HTT spacer sequence GTCN PAM
ucagacacacaccaagccac

SEQ ID NO: 24610 - RNA, 20 nt, Artificial Sequence
  HTT spacer sequence GTCN PAM
caggugcucuuccuggcugu

SEQ ID NO: 24611 - RNA, 20 nt, Artificial Sequence
  HTT spacer sequence GTCN PAM
ccuugcuucuuucccauguc

SEQ ID NO: 24612 - RNA, 20 nt, Artificial Sequence
  HTT spacer sequence GTCN PAM
ucuucuuuguuuccagccau

SEQ ID NO: 24613 - RNA, 20 nt, Artificial Sequence
  HTT spacer sequence GTCN PAM
ggcccagcgggcuggcagcg

SEQ ID NO: 24614 - RNA, 20 nt, Artificial Sequence
  HTT spacer sequence GTCN PAM
cacgugcucucccacgccuc

SEQ ID NO: 24615 - RNA, 20 nt, Artificial Sequence
  HTT spacer sequence GTCN PAM
cguagccuucagguccuaga

SEQ ID NO: 24616 - RNA, 20 nt, Artificial Sequence
  HTT spacer sequence GTCN PAM
uagacuuugucuucucauga

SEQ ID NO: 24617 - RNA, 20 nt, Artificial Sequence
  HTT spacer sequence GTCN PAM
aggaccugaaggcuacguga

SEQ ID NO: 24618 - RNA, 20 nt, Artificial Sequence
  HTT spacer sequence GTCN PAM
ucucaugaguauggcugugu

SEQ ID NO: 24619 - RNA, 20 nt, Artificial Sequence
  HTT spacer sequence GTCN PAM
gauacccagugcauuucucu

SEQ ID NO: 24620 - RNA, 20 nt, Artificial Sequence
  HTT spacer sequence GTCN PAM
caggcggugaagcacgugug

SEQ ID NO: 24621 - RNA, 20 nt, Artificial Sequence
  HTT spacer sequence GTCN PAM
agcaagaacuucauaugugg

SEQ ID NO: 24622 - RNA, 20 nt, Artificial Sequence
  HTT spacer sequence GTCN PAM
ccguucugugaggugcuggc

SEQ ID NO: 24623 - RNA, 20 nt, Artificial Sequence
  HTT spacer sequence GTCN PAM
agaggcugaagugauuuuug

SEQ ID NO: 24624 - RNA, 20 nt, Artificial Sequence
  HTT spacer sequence GTCN PAM
agggaggcaggaaaggcuuc

SEQ ID NO: 24625 - RNA, 20 nt, Artificial Sequence
  HTT spacer sequence GTCN PAM
gcagccaguaggugaaagag

SEQ ID NO: 24626 - RNA, 20 nt, Artificial Sequence
  HTT spacer sequence GTCN PAM
ccaaucuacucuuucaccua

SEQ ID NO: 24627 - RNA, 20 nt, Artificial Sequence
  HTT spacer sequence GTCN PAM
caaggggugccaggaagcug

SEQ ID NO: 24628 - RNA, 20 nt, Artificial Sequence
  HTT spacer sequence GTCN PAM
cacucucuggcagcauaaga

SEQ ID NO: 24629 - RNA, 20 nt, Artificial Sequence
  HTT spacer sequence GTCN PAM
ggucaagggguuguaccuug

SEQ ID NO: 24630 - RNA, 20 nt, Artificial Sequence
  HTT spacer sequence GTCN PAM
agggguuguaccuuguuugg

SEQ ID NO: 24631 - RNA, 20 nt, Artificial Sequence
  HTT spacer sequence GTCN PAM
ucaagagccccuaauucucu

SEQ ID NO: 24632 - RNA, 20 nt, Artificial Sequence
  HTT spacer sequence GTCN PAM
ggggaguguaucauuuagga

SEQ ID NO: 24633 - RNA, 20 nt, Artificial Sequence
  HTT spacer sequence GTCN PAM
cucuuccuaaaugauacacu

SEQ ID NO: 24634 - RNA, 20 nt, Artificial Sequence
  HTT spacer sequence GTCN PAM
ucaccgggucacucuuccua

SEQ ID NO: 24635 - RNA, 20 nt, Artificial Sequence
  HTT spacer sequence GTCN PAM
uccucuaccccacguccuca

SEQ ID NO: 24636 - RNA, 20 nt, Artificial Sequence
  HTT spacer sequence GTCN PAM
aggugggagugaguagaccc

SEQ ID NO: 24637 - RNA, 20 nt, Artificial Sequence
  HTT spacer sequence GTCN PAM
acucacucccaccuggacuc

SEQ ID NO: 24638 - RNA, 20 nt, Artificial Sequence
  HTT spacer sequence GTCN PAM
gcggaagcaggggcaagagg

SEQ ID NO: 24639 - RNA, 20 nt, Artificial Sequence
  HTT spacer sequence GTCN PAM
cugggugauggcagcacgcu

SEQ ID NO: 24640 - RNA, 20 nt, Artificial Sequence
  HTT spacer sequence GTCN PAM
cucacaaucuacgccagucg

SEQ ID NO: 24641 - RNA, 20 nt, Artificial Sequence
  HTT spacer sequence GTCN PAM
aauucgcuuugcucauuuaa

SEQ ID NO: 24642 - RNA, 20 nt, Artificial Sequence
  HTT spacer sequence GTCN PAM
uuaaaugagcaaagcgaauu

SEQ ID NO: 24643 - RNA, 20 nt, Artificial Sequence
  HTT spacer sequence GTCN PAM
gcaagcuugaaaaucaaaac

SEQ ID NO: 24644 - RNA, 20 nt, Artificial Sequence
  HTT spacer sequence GTCN PAM
ucguaaaacuuguggguuaa

SEQ ID NO: 24645 - RNA, 20 nt, Artificial Sequence
  HTT spacer sequence GTCN PAM
acuuacaucaacugcccaug

SEQ ID NO: 24646 - RNA, 20 nt, Artificial Sequence
  HTT spacer sequence GTCN PAM
augaucucuuuaaccguggc

SEQ ID NO: 24647 - RNA, 20 nt, Artificial Sequence
  HTT spacer sequence GTCN PAM
ucccugucccauccccuagc

SEQ ID NO: 24648 - RNA, 20 nt, Artificial Sequence
  HTT spacer sequence GTCN PAM
cauccccuagcuugagaagc

SEQ ID NO: 24649 - RNA, 20 nt, Artificial Sequence
  HTT spacer sequence GTCN PAM
acauuagagaagggcuucuc

SEQ ID NO: 24650 - RNA, 20 nt, Artificial Sequence
  HTT spacer sequence GTCN PAM
acuucaagcuaguaacgaug

SEQ ID NO: 24651 - RNA, 20 nt, Artificial Sequence
  HTT spacer sequence GTCN PAM
agauggucaacuucaagcua

SEQ ID NO: 24652 - RNA, 20 nt, Artificial Sequence
  HTT spacer sequence GTCN PAM
ggggggcagggaccacgggc

SEQ ID NO: 24653 - RNA, 20 nt, Artificial Sequence
  HTT spacer sequence GTCN PAM
cugccccccugacccagagc

SEQ ID NO: 24654 - RNA, 20 nt, Artificial Sequence
  HTT spacer sequence GTCN PAM
gguaugcccguggucccugc

SEQ ID NO: 24655 - RNA, 20 nt, Artificial Sequence
  HTT spacer sequence GTCN PAM
ugcauccuuuucugcaggug

SEQ ID NO: 24656 - RNA, 20 nt, Artificial Sequence
  HTT spacer sequence GTCN PAM
gugguuuauaaguacaccca

SEQ ID NO: 24657 - RNA, 20 nt, Artificial Sequence
  HTT spacer sequence GTCN PAM
cgagcacuguggguguacuu

SEQ ID NO: 24658 - RNA, 20 nt, Artificial Sequence
  HTT spacer sequence GTCN PAM
agggugccgucugagcccgu

SEQ ID NO: 24659 - RNA, 20 nt, Artificial Sequence
  HTT spacer sequence GTCN PAM
gagcccguaucauccaacag

SEQ ID NO: 24660 - RNA, 20 nt, Artificial Sequence
  HTT spacer sequence GTCN PAM
cuacuaaaaaauacaaaaau

SEQ ID NO: 24661 - RNA, 20 nt, Artificial Sequence
  HTT spacer sequence GTCN PAM
ggcuggucuugaacuccuga

SEQ ID NO: 24662 - RNA, 20 nt, Artificial Sequence
  HTT spacer sequence GTCN PAM
ugaacuccugaccucaggug

SEQ ID NO: 24663 - RNA, 20 nt, Artificial Sequence
  HTT spacer sequence GTCN PAM
ggaguucaagaccagccuga

SEQ ID NO: 24664 - RNA, 20 nt, Artificial Sequence
  HTT spacer sequence GTCN PAM
uucacuuaaacagaaaaaug

SEQ ID NO: 24665 - RNA, 20 nt, Artificial Sequence
  HTT spacer sequence GTCN PAM
uccauaaaucucuugugauu

SEQ ID NO: 24666 - RNA, 20 nt, Artificial Sequence
  HTT spacer sequence GTCN PAM
caaaaauaaaauaaaauaag

SEQ ID NO: 24667 - RNA, 20 nt, Artificial Sequence
  HTT spacer sequence GTCN PAM
ugcuuucacccaugcuagag

SEQ ID NO: 24668 - RNA, 20 nt, Artificial Sequence
  HTT spacer sequence GTCN PAM
ugccacuguacucuagcaug

SEQ ID NO: 24669 - RNA, 20 nt, Artificial Sequence
  HTT spacer sequence GTCN PAM
caaacuccugaccucaggug

SEQ ID NO: 24670 - RNA, 20 nt, Artificial Sequence
  HTT spacer sequence GTCN PAM
ggaguuugagaccagcccaa

SEQ ID NO: 24671 - RNA, 20 nt, Artificial Sequence
  HTT spacer sequence GTCN PAM
gggcacaguggcucaugccu

SEQ ID NO: 24672 - RNA, 20 nt, Artificial Sequence
  HTT spacer sequence GTCN PAM
cgaacuccugaucucaggug

SEQ ID NO: 24673 - RNA, 20 nt, Artificial Sequence
  HTT spacer sequence GTCN PAM
cuacuaaaaauacaaaaauu

SEQ ID NO: 24674 - RNA, 20 nt, Artificial Sequence
  HTT spacer sequence GTCN PAM
cucaggcuggaaugcagugg

SEQ ID NO: 24675 - RNA, 20 nt, Artificial Sequence
  HTT spacer sequence GTCN PAM
cacucugucgcucaggcugg

SEQ ID NO: 24676 - RNA, 20 nt, Artificial Sequence
  HTT spacer sequence GTCN PAM
caaaaaauaaaaaugaaaua

SEQ ID NO: 24677 - RNA, 20 nt, Artificial Sequence
  HTT spacer sequence GTCN PAM
cagcacuuugggaaccugag

SEQ ID NO: 24678 - RNA, 20 nt, Artificial Sequence
  HTT spacer sequence GTCN PAM
caagcauccaccugccucag

SEQ ID NO: 24679 - RNA, 20 nt, Artificial Sequence
  HTT spacer sequence GTCN PAM
caaacuccuggucucaagca

SEQ ID NO: 24680 - RNA, 20 nt, Artificial Sequence
  HTT spacer sequence GTCN PAM
guacagaaauuagcugggug

SEQ ID NO: 24681 - RNA, 20 nt, Artificial Sequence
  HTT spacer sequence GTCN PAM
cagcuacuugggagauugag

SEQ ID NO: 24682 - RNA, 20 nt, Artificial Sequence
  HTT spacer sequence GTCN PAM
cccaggcugaagggcagugg

SEQ ID NO: 24683 - RNA, 20 nt, Artificial Sequence
  HTT spacer sequence GTCN PAM
cacuuggucgcccaggcuga

SEQ ID NO: 24684 - RNA, 20 nt, Artificial Sequence
  HTT spacer sequence GTCN PAM
caaaagaaaaacaaaaaaac

SEQ ID NO: 24685 - RNA, 20 nt, Artificial Sequence
  HTT spacer sequence GTCN PAM
auaauagugguuuguuuuuu

SEQ ID NO: 24686 - RNA, 20 nt, Artificial Sequence
  HTT spacer sequence GTCN PAM
augaucccucugcugugcug

SEQ ID NO: 24687 - RNA, 20 nt, Artificial Sequence
  HTT spacer sequence GTCN PAM
aauaccaggucuugggcccu

SEQ ID NO: 24688 - RNA, 20 nt, Artificial Sequence
  HTT spacer sequence GTCN PAM
ugggcccuuauuuccaucac

SEQ ID NO: 24689 - RNA, 20 nt, Artificial Sequence
  HTT spacer sequence GTCN PAM
accaaacagcauuuccuucu

SEQ ID NO: 24690 - RNA, 20 nt, Artificial Sequence
  HTT spacer sequence GTCN PAM
agugggcuucaauuauaaag

SEQ ID NO: 24691 - RNA, 20 nt, Artificial Sequence
  HTT spacer sequence GTCN PAM
ccaagaggguugcauagaaa

SEQ ID NO: 24692 - RNA, 20 nt, Artificial Sequence
  HTT spacer sequence GTCN PAM
cauacuagucaccaagaggg

SEQ ID NO: 24693 - RNA, 20 nt, Artificial Sequence
  HTT spacer sequence GTCN PAM
ggggccagcugcuacugauc

SEQ ID NO: 24694 - RNA, 20 nt, Artificial Sequence
  HTT spacer sequence GTCN PAM
cagcucagaugucauuucaa

SEQ ID NO: 24695 - RNA, 20 nt, Artificial Sequence
  HTT spacer sequence GTCN PAM
uuucaaaagucugcucugcc

SEQ ID NO: 24696 - RNA, 20 nt, Artificial Sequence
  HTT spacer sequence GTCN PAM
gcucugcccucuccaaauug

SEQ ID NO: 24697 - RNA, 20 nt, Artificial Sequence
  HTT spacer sequence GTCN PAM
accuugcccuguuuauguuu

SEQ ID NO: 24698 - RNA, 20 nt, Artificial Sequence
  HTT spacer sequence GTCN PAM
acugcaauuuggagagggca

SEQ ID NO: 24699 - RNA, 20 nt, Artificial Sequence
  HTT spacer sequence GTCN PAM
gaaauugucacguacagucu

SEQ ID NO: 24700 - RNA, 20 nt, Artificial Sequence
  HTT spacer sequence GTCN PAM
cguacagucuaucugugugc

SEQ ID NO: 24701 - RNA, 20 nt, Artificial Sequence
  HTT spacer sequence GTCN PAM
aucugugugcuuguuuauuu

SEQ ID NO: 24702 - RNA, 20 nt, Artificial Sequence
  HTT spacer sequence GTCN PAM
cuugcggaagggugggauag

SEQ ID NO: 24703 - RNA, 20 nt, Artificial Sequence
  HTT spacer sequence GTCN PAM
uggggcacacaucccauaag

SEQ ID NO: 24704 - RNA, 20 nt, Artificial Sequence
  HTT spacer sequence GTCN PAM
uacugucuuaugcucuguug

SEQ ID NO: 24705 - RNA, 20 nt, Artificial Sequence
  HTT spacer sequence GTCN PAM
uaugcucuguugcagcccag

SEQ ID NO: 24706 - RNA, 20 nt, Artificial Sequence
  HTT spacer sequence GTCN PAM
gcacauaguacuugcuuaaa

SEQ ID NO: 24707 - RNA, 20 nt, Artificial Sequence
  HTT spacer sequence GTCN PAM
gcaauaaugaaauugguacc

SEQ ID NO: 24708 - RNA, 20 nt, Artificial Sequence
  HTT spacer sequence GTCN PAM
guuacaugaguuaaaaauau

SEQ ID NO: 24709 - RNA, 20 nt, Artificial Sequence
  HTT spacer sequence GTCN PAM
aaacaguuguaucuuaacgg

SEQ ID NO: 24710 - RNA, 20 nt, Artificial Sequence
  HTT spacer sequence GTCN PAM
ugcuuuuguuucucaauccg

SEQ ID NO: 24711 - RNA, 20 nt, Artificial Sequence
  HTT spacer sequence GTCN PAM
augggauaucagcaucagca

SEQ ID NO: 24712 - RNA, 20 nt, Artificial Sequence
  HTT spacer sequence GTCN PAM
cugggaauguggucuaaacc

SEQ ID NO: 24713 - RNA, 20 nt, Artificial Sequence
  HTT spacer sequence GTCN PAM
aaacccucacuauuaauaug

SEQ ID NO: 24714 - RNA, 20 nt, Artificial Sequence
  HTT spacer sequence GTCN PAM
ggcauaguggcucauaccuu

SEQ ID NO: 24715 - RNA, 20 nt, Artificial Sequence
  HTT spacer sequence GTCN PAM
agcaauccaccugccuuggc

SEQ ID NO: 24716 - RNA, 20 nt, Artificial Sequence
  HTT spacer sequence GTCN PAM
gggucaagcaauccaccugc

SEQ ID NO: 24717 - RNA, 20 nt, Artificial Sequence
  HTT spacer sequence GTCN PAM
cagccacucgagaggcugag

SEQ ID NO: 24718 - RNA, 20 nt, Artificial Sequence
  HTT spacer sequence GTCN PAM
uguugagccaagaucgcacc

SEQ ID NO: 24719 - RNA, 20 nt, Artificial Sequence
  HTT spacer sequence GTCN PAM
cacucuguugcccaggcugg

SEQ ID NO: 24720 - RNA, 20 nt, Artificial Sequence
  HTT spacer sequence GTCN PAM
caaaaaaaccaaaauccaga

SEQ ID NO: 24721 - RNA, 20 nt, Artificial Sequence
  HTT spacer sequence GTCN PAM
cuuuggcugcuaugugcaga

SEQ ID NO: 24722 - RNA, 20 nt, Artificial Sequence
  HTT spacer sequence GTCN PAM
ugucauucccuuauuuaaac

SEQ ID NO: 24723 - RNA, 20 nt, Artificial Sequence
  HTT spacer sequence GTCN PAM
uucccuuauuuaaacucuug

SEQ ID NO: 24724 - RNA, 20 nt, Artificial Sequence
  HTT spacer sequence GTCN PAM
ggaaucucuaucuaaacggc

SEQ ID NO: 24725 - RNA, 20 nt, Artificial Sequence
  HTT spacer sequence GTCN PAM
auggcucugucaccucagac

SEQ ID NO: 24726 - RNA, 20 nt, Artificial Sequence
  HTT spacer sequence GTCN PAM
ccucagacacccugcauuga

SEQ ID NO: 24727 - RNA, 20 nt, Artificial Sequence
  HTT spacer sequence GTCN PAM
gaggugacagagccauugac

SEQ ID NO: 24728 - RNA, 20 nt, Artificial Sequence
  HTT spacer sequence GTCN PAM
augcagggugucugagguga

SEQ ID NO: 24729 - RNA, 20 nt, Artificial Sequence
  HTT spacer sequence GTCN PAM
gauuagagucagguuuuucu

SEQ ID NO: 24730 - RNA, 20 nt, Artificial Sequence
  HTT spacer sequence GTCN PAM
gguuuuucuuccuccugaug

SEQ ID NO: 24731 - RNA, 20 nt, Artificial Sequence
  HTT spacer sequence GTCN PAM
cuuccuuagggagguuuccc

SEQ ID NO: 24732 - RNA, 20 nt, Artificial Sequence
  HTT spacer sequence GTCN PAM
ggcaacaagcacggccucag

SEQ ID NO: 24733 - RNA, 20 nt, Artificial Sequence
  HTT spacer sequence GTCN PAM
cucuguguguugggugaauu

SEQ ID NO: 24734 - RNA, 20 nt, Artificial Sequence
  HTT spacer sequence GTCN PAM
cagaucacaggaauucaccc

SEQ ID NO: 24735 - RNA, 20 nt, Artificial Sequence
  HTT spacer sequence GTCN PAM
uacacauucggcuuuucuuc

SEQ ID NO: 24736 - RNA, 20 nt, Artificial Sequence
  HTT spacer sequence GTCN PAM
cccaacacuugagcuucauc

SEQ ID NO: 24737 - RNA, 20 nt, Artificial Sequence
  HTT spacer sequence GTCN PAM
cuaaugggauggggaaaacu

SEQ ID NO: 24738 - RNA, 20 nt, Artificial Sequence
  HTT spacer sequence GTCN PAM
uucuuccagcucuccuucag

SEQ ID NO: 24739 - RNA, 20 nt, Artificial Sequence
  HTT spacer sequence GTCN PAM
ggcacggcagaagguucacc

SEQ ID NO: 24740 - RNA, 20 nt, Artificial Sequence
  HTT spacer sequence GTCN PAM
cuugcuuguucgagucaggc

SEQ ID NO: 24741 - RNA, 20 nt, Artificial Sequence
  HTT spacer sequence GTCN PAM
aggagaccuuggcugcagcu

SEQ ID NO: 24742 - RNA, 20 nt, Artificial Sequence
  HTT spacer sequence GTCN PAM
ccuggacugauucuucgggu

SEQ ID NO: 24743 - RNA, 20 nt, Artificial Sequence
  HTT spacer sequence GTCN PAM
uuugcaaaauugccaaaaga

SEQ ID NO: 24744 - RNA, 20 nt, Artificial Sequence
  HTT spacer sequence GTCN PAM
caaacaugcgagugaugcug

SEQ ID NO: 24745 - RNA, 20 nt, Artificial Sequence
  HTT spacer sequence GTCN PAM
guggagggugagggcuucug

SEQ ID NO: 24746 - RNA, 20 nt, Artificial Sequence
  HTT spacer sequence GTCN PAM
ugugggagugcuucuugggg

SEQ ID NO: 24747 - RNA, 20 nt, Artificial Sequence
  HTT spacer sequence GTCN PAM
uaauuuagacuaccaucauu

SEQ ID NO: 24748 - RNA, 20 nt, Artificial Sequence
  HTT spacer sequence GTCN PAM
aaauuacgacauacaacaua

SEQ ID NO: 24749 - RNA, 20 nt, Artificial Sequence
  HTT spacer sequence GTCN PAM
uuaggugccucaaaaauaac

SEQ ID NO: 24750 - RNA, 20 nt, Artificial Sequence
  HTT spacer sequence GTCN PAM
cucuaguacgccgaaaacaa

SEQ ID NO: 24751 - RNA, 20 nt, Artificial Sequence
  HTT spacer sequence GTCN PAM
ucuucccgcagcuagguuaa

SEQ ID NO: 24752 - RNA, 20 nt, Artificial Sequence
  HTT spacer sequence GTCN PAM
uggcacagucaucuucccgc

SEQ ID NO: 24753 - RNA, 20 nt, Artificial Sequence
  HTT spacer sequence GTCN PAM
gugagcuuucuccuaccugc

SEQ ID NO: 24754 - RNA, 20 nt, Artificial Sequence
  HTT spacer sequence GTCN PAM
gaacguccugcagcuaucag

SEQ ID NO: 24755 - RNA, 20 nt, Artificial Sequence
  HTT spacer sequence GTCN PAM
ugcagcuaucagagccuguu

SEQ ID NO: 24756 - RNA, 20 nt, Artificial Sequence
  HTT spacer sequence GTCN PAM
agaaauagugacccugucac

SEQ ID NO: 24757 - RNA, 20 nt, Artificial Sequence
  HTT spacer sequence GTCN PAM
cuauuucuggacauuauaaa

SEQ ID NO: 24758 - RNA, 20 nt, Artificial Sequence
  HTT spacer sequence GTCN PAM
caugcucuacagauuacagg

SEQ ID NO: 24759 - RNA, 20 nt, Artificial Sequence
  HTT spacer sequence GTCN PAM
guccuggguuugagcccaag

SEQ ID NO: 24760 - RNA, 20 nt, Artificial Sequence
  HTT spacer sequence GTCN PAM
uggguuugagcccaagugac

SEQ ID NO: 24761 - RNA, 20 nt, Artificial Sequence
  HTT spacer sequence GTCN PAM
cuugggcucaaacccaggac

SEQ ID NO: 24762 - RNA, 20 nt, Artificial Sequence
  HTT spacer sequence GTCN PAM
aucugauuccacucuaccca

SEQ ID NO: 24763 - RNA, 20 nt, Artificial Sequence
  HTT spacer sequence GTCN PAM
ucuuuacuaguuauuuuccu

SEQ ID NO: 24764 - RNA, 20 nt, Artificial Sequence
  HTT spacer sequence GTCN PAM
cauuaaggcuuauuuuucag

SEQ ID NO: 24765 - RNA, 20 nt, Artificial Sequence
  HTT spacer sequence GTCN PAM
cccacgggaagggcuuagau

SEQ ID NO: 24766 - RNA, 20 nt, Artificial Sequence
  HTT spacer sequence GTCN PAM
ugggguuuuggaaugacgaa

SEQ ID NO: 24767 - RNA, 20 nt, Artificial Sequence
  HTT spacer sequence GTCN PAM
uuccaaaaccccaugacuag

SEQ ID NO: 24768 - RNA, 20 nt, Artificial Sequence
  HTT spacer sequence GTCN PAM
gaggcugugagagcuccaca

SEQ ID NO: 24769 - RNA, 20 nt, Artificial Sequence
  HTT spacer sequence GTCN PAM
guugaaggcaguccccucug

SEQ ID NO: 24770 - RNA, 20 nt, Artificial Sequence
  HTT spacer sequence GTCN PAM
ccucugugauaucucuggcu

SEQ ID NO: 24771 - RNA, 20 nt, Artificial Sequence
  HTT spacer sequence GTCN PAM
gagcucagaugauagauggu

SEQ ID NO: 24772 - RNA, 20 nt, Artificial Sequence
  HTT spacer sequence GTCN PAM
caaacuccuggccucaagca

SEQ ID NO: 24773 - RNA, 20 nt, Artificial Sequence
  HTT spacer sequence GTCN PAM
cacuaucuugcccaggcugg

SEQ ID NO: 24774 - RNA, 20 nt, Artificial Sequence
  HTT spacer sequence GTCN PAM
agcuaauuuuuuuucaguuu

SEQ ID NO: 24775 - RNA, 20 nt, Artificial Sequence
  HTT spacer sequence GTCN PAM
uagcuacucaggaggcugag

SEQ ID NO: 24776 - RNA, 20 nt, Artificial Sequence
  HTT spacer sequence GTCN PAM
cagccuccugaguagcuagg

SEQ ID NO: 24777 - RNA, 20 nt, Artificial Sequence
  HTT spacer sequence GTCN PAM
cacaggcaaacauaacucuu

SEQ ID NO: 24778 - RNA, 20 nt, Artificial Sequence
  HTT spacer sequence GTCN PAM
uugcacuccagccuuggcaa

SEQ ID NO: 24779 - RNA, 20 nt, Artificial Sequence
  HTT spacer sequence GTCN PAM
cccggguucaagcgauucuc

SEQ ID NO: 24780 - RNA, 20 nt, Artificial Sequence
  HTT spacer sequence GTCN PAM
ggcuggucucgaacuccuga

SEQ ID NO: 24781 - RNA, 20 nt, Artificial Sequence
  HTT spacer sequence GTCN PAM
cgaacuccugaccucaggug

SEQ ID NO: 24782 - RNA, 20 nt, Artificial Sequence
  HTT spacer sequence GTCN PAM
ggaguucgagaccagccuga

SEQ ID NO: 24783 - RNA, 20 nt, Artificial Sequence
  HTT spacer sequence GTCN PAM
aaaauugaaaaaaaaaauag

SEQ ID NO: 24784 - RNA, 20 nt, Artificial Sequence
  HTT spacer sequence GTCN PAM
ugguugcuuacguauuauau

SEQ ID NO: 24785 - RNA, 20 nt, Artificial Sequence
  HTT spacer sequence GTCN PAM
ucucuccaguuucaacccag

SEQ ID NO: 24786 - RNA, 20 nt, Artificial Sequence
  HTT spacer sequence GTCN PAM
uccuccuccuccccaggucc

SEQ ID NO: 24787 - RNA, 20 nt, Artificial Sequence
  HTT spacer sequence GTCN PAM
ccaacuucaucuguccuccu

SEQ ID NO: 24788 - RNA, 20 nt, Artificial Sequence
  HTT spacer sequence GTCN PAM
ccuagaacuucgauaggggc

SEQ ID NO: 24789 - RNA, 20 nt, Artificial Sequence
  HTT spacer sequence GTCN PAM
ccagcacugggucaccuaga

SEQ ID NO: 24790 - RNA, 20 nt, Artificial Sequence
  HTT spacer sequence GTCN PAM
aaucauggaggugggggcua

SEQ ID NO: 24791 - RNA, 20 nt, Artificial Sequence
  HTT spacer sequence GTCN PAM
ccuccaccuccaagaugccu

SEQ ID NO: 24792 - RNA, 20 nt, Artificial Sequence
  HTT spacer sequence GTCN PAM
uguucaaucuucuuccagau

SEQ ID NO: 24793 - RNA, 20 nt, Artificial Sequence
  HTT spacer sequence GTCN PAM
ggaucuggaagaagauugaa

SEQ ID NO: 24794 - RNA, 20 nt, Artificial Sequence
  HTT spacer sequence GTCN PAM
gaggaaagcugaaccuagaa

SEQ ID NO: 24795 - RNA, 20 nt, Artificial Sequence
  HTT spacer sequence GTCN PAM
uuguacaacuuuuuguuuuc

SEQ ID NO: 24796 - RNA, 20 nt, Artificial Sequence
  HTT spacer sequence GTCN PAM
ucucacaccuuccaacuucu

SEQ ID NO: 24797 - RNA, 20 nt, Artificial Sequence
  HTT spacer sequence GTCN PAM
ugaaaaauuguacuaaacac

SEQ ID NO: 24798 - RNA, 20 nt, Artificial Sequence
  HTT spacer sequence GTCN PAM
uccaacuugaguuauccagc

SEQ ID NO: 24799 - RNA, 20 nt, Artificial Sequence
  HTT spacer sequence GTCN PAM
gggcagguugaucuucaggu

SEQ ID NO: 24800 - RNA, 20 nt, Artificial Sequence
  HTT spacer sequence GTCN PAM
guaguacacuuguauccuag

SEQ ID NO: 24801 - RNA, 20 nt, Artificial Sequence
  HTT spacer sequence GTCN PAM
uaggauacaaguguacuaca

SEQ ID NO: 24802 - RNA, 20 nt, Artificial Sequence
  HTT spacer sequence GTCN PAM
aguagcuuccugagagaaga

SEQ ID NO: 24803 - RNA, 20 nt, Artificial Sequence
  HTT spacer sequence GTCN PAM
uugcccuguugucuuaaaau

SEQ ID NO: 24804 - RNA, 20 nt, Artificial Sequence
  HTT spacer sequence GTCN PAM
uaaaaucuccaacgugaccc

SEQ ID NO: 24805 - RNA, 20 nt, Artificial Sequence
  HTT spacer sequence GTCN PAM
cguuggagauuuuaagacaa

SEQ ID NO: 24806 - RNA, 20 nt, Artificial Sequence
  HTT spacer sequence GTCN PAM
uccuagauugacucacaucu

SEQ ID NO: 24807 - RNA, 20 nt, Artificial Sequence
  HTT spacer sequence GTCN PAM
aucuaggaggaccaacaucc

SEQ ID NO: 24808 - RNA, 20 nt, Artificial Sequence
  HTT spacer sequence GTCN PAM
cuugauggggucuugcccug

SEQ ID NO: 24809 - RNA, 20 nt, Artificial Sequence
  HTT spacer sequence GTCN PAM
ugcccuguugcccagguugu

SEQ ID NO: 24810 - RNA, 20 nt, Artificial Sequence
  HTT spacer sequence GTCN PAM
caacuacuugggagggugag

SEQ ID NO: 24811 - RNA, 20 nt, Artificial Sequence
  HTT spacer sequence GTCN PAM
agcuauuuucuuuacuuuuu

SEQ ID NO: 24812 - RNA, 20 nt, Artificial Sequence
  HTT spacer sequence GTCN PAM
uacucugucgcccaggcuag

SEQ ID NO: 24813 - RNA, 20 nt, Artificial Sequence
  HTT spacer sequence GTCN PAM
cccaggcuagagugcggugg

SEQ ID NO: 24814 - RNA, 20 nt, Artificial Sequence
  HTT spacer sequence GTCN PAM
cgaacgccugaccucaggug

SEQ ID NO: 24815 - RNA, 20 nt, Artificial Sequence
  HTT spacer sequence GTCN PAM
ggcguucgagaccagccugg

SEQ ID NO: 24816 - RNA, 20 nt, Artificial Sequence
  HTT spacer sequence GTCN PAM
uuuccucuugagucagcuag

SEQ ID NO: 24817 - RNA, 20 nt, Artificial Sequence
  HTT spacer sequence GTCN PAM
gcuaguaucccuggaaggaa

SEQ ID NO: 24818 - RNA, 20 nt, Artificial Sequence
  HTT spacer sequence GTCN PAM
ccgguugcaggauaaacaua

SEQ ID NO: 24819 - RNA, 20 nt, Artificial Sequence
  HTT spacer sequence GTCN PAM
ccucccuuccaguccccggu

SEQ ID NO: 24820 - RNA, 20 nt, Artificial Sequence
  HTT spacer sequence GTCN PAM
guccccucccuuccaguccc

SEQ ID NO: 24821 - RNA, 20 nt, Artificial Sequence
  HTT spacer sequence GTCN PAM
gggugcccucuuacuuuuug

SEQ ID NO: 24822 - RNA, 20 nt, Artificial Sequence
  HTT spacer sequence GTCN PAM
guccucagccuauguaaaca

SEQ ID NO: 24823 - RNA, 20 nt, Artificial Sequence
  HTT spacer sequence GTCN PAM
ucagccuauguaaacaccuc

SEQ ID NO: 24824 - RNA, 20 nt, Artificial Sequence
  HTT spacer sequence GTCN PAM
ucccuccaauccaaggcagc

SEQ ID NO: 24825 - RNA, 20 nt, Artificial Sequence
  HTT spacer sequence GTCN PAM
cauggcuccuugggcaaauu

SEQ ID NO: 24826 - RNA, 20 nt, Artificial Sequence
  HTT spacer sequence GTCN PAM
guggcuucaauaagcuugcu

SEQ ID NO: 24827 - RNA, 20 nt, Artificial Sequence
  HTT spacer sequence GTCN PAM
ccagcaaagcuugcauuuga

SEQ ID NO: 24828 - RNA, 20 nt, Artificial Sequence
  HTT spacer sequence GTCN PAM
guuauguagcucuuguuacu

SEQ ID NO: 24829 - RNA, 20 nt, Artificial Sequence
  HTT spacer sequence GTCN PAM
acaaaacuucggaagcuaaa

SEQ ID NO: 24830 - RNA, 20 nt, Artificial Sequence
  HTT spacer sequence GTCN PAM
gcuaaugucccuguucuguu

SEQ ID NO: 24831 - RNA, 20 nt, Artificial Sequence
  HTT spacer sequence GTCN PAM
cuguucuguucuuucuguuc

SEQ ID NO: 24832 - RNA, 20 nt, Artificial Sequence
  HTT spacer sequence GTCN PAM
ggaaaaggaaaaacaaggga

SEQ ID NO: 24833 - RNA, 20 nt, Artificial Sequence
  HTT spacer sequence GTCN PAM
uguaugguauguacauuucc

SEQ ID NO: 24834 - RNA, 20 nt, Artificial Sequence
  HTT spacer sequence GTCN PAM
agacagaauauuaccaagca

SEQ ID NO: 24835 - RNA, 20 nt, Artificial Sequence
  HTT spacer sequence GTCN PAM
ugaccuggguggcgguuaca

SEQ ID NO: 24836 - RNA, 20 nt, Artificial Sequence
  HTT spacer sequence GTCN PAM
cugcuccugccuuccucccc

SEQ ID NO: 24837 - RNA, 20 nt, Artificial Sequence
  HTT spacer sequence GTCN PAM
ugacugcuggcuucuaauuc

SEQ ID NO: 24838 - RNA, 20 nt, Artificial Sequence
  HTT spacer sequence GTCN PAM
ugaccuuggggaggaaggca

SEQ ID NO: 24839 - RNA, 20 nt, Artificial Sequence
  HTT spacer sequence GTCN PAM
guuuuuaaauucuguguaca

SEQ ID NO: 24840 - RNA, 20 nt, Artificial Sequence
  HTT spacer sequence GTCN PAM
auguacacagaauuuaaaaa

SEQ ID NO: 24841 - RNA, 20 nt, Artificial Sequence
  HTT spacer sequence GTCN PAM
gguuuauuuuggucgacauu

SEQ ID NO: 24842 - RNA, 20 nt, Artificial Sequence
  HTT spacer sequence GTCN PAM
acauuaaguucaugagaguc

SEQ ID NO: 24843 - RNA, 20 nt, Artificial Sequence
  HTT spacer sequence GTCN PAM
accaaaauaaaccagacaaa

SEQ ID NO: 24844 - RNA, 20 nt, Artificial Sequence
  HTT spacer sequence GTCN PAM
ucuauauuaucguguguauu

SEQ ID NO: 24845 - RNA, 20 nt, Artificial Sequence
  HTT spacer sequence GTCN PAM
caguagcacugcucgcaaua

SEQ ID NO: 24846 - RNA, 20 nt, Artificial Sequence
  HTT spacer sequence GTCN PAM
uuuggaguacaugugcaggu

SEQ ID NO: 24847 - RNA, 20 nt, Artificial Sequence
  HTT spacer sequence GTCN PAM
ucgcuagcacuuggaauugc

SEQ ID NO: 24848 - RNA, 20 nt, Artificial Sequence
  HTT spacer sequence GTCN PAM
aaucucuacaaucccaagaa

SEQ ID NO: 24849 - RNA, 20 nt, Artificial Sequence
  HTT spacer sequence GTCN PAM
gagagcuccaaggggccucc

SEQ ID NO: 24850 - RNA, 20 nt, Artificial Sequence
  HTT spacer sequence GTCN PAM
gcacacggugagcuuaaaua

SEQ ID NO: 24851 - RNA, 20 nt, Artificial Sequence
  HTT spacer sequence GTCN PAM
auuuggacucauacaaugau

SEQ ID NO: 24852 - RNA, 20 nt, Artificial Sequence
  HTT spacer sequence GTCN PAM
aaauagacaagcacaaugag

SEQ ID NO: 24853 - RNA, 20 nt, Artificial Sequence
  HTT spacer sequence GTCN PAM
caaagaaaaaaaaaaaauca

SEQ ID NO: 24854 - RNA, 20 nt, Artificial Sequence
  HTT spacer sequence GTCN PAM
ugcucuguugccuaggcugg

SEQ ID NO: 24855 - RNA, 20 nt, Artificial Sequence
  HTT spacer sequence GTCN PAM
cagcuacuugagaagcugag

SEQ ID NO: 24856 - RNA, 20 nt, Artificial Sequence
  HTT spacer sequence GTCN PAM
cuacuaaaaauacaaacauu

SEQ ID NO: 24857 - RNA, 20 nt, Artificial Sequence
  HTT spacer sequence GTCN PAM
caaacuccugaccucaagug

SEQ ID NO: 24858 - RNA, 20 nt, Artificial Sequence
  HTT spacer sequence GTCN PAM
ggaguuugagaccaaccugg

SEQ ID NO: 24859 - RNA, 20 nt, Artificial Sequence
  HTT spacer sequence GTCN PAM
gagaugauucuacuuuguuc

SEQ ID NO: 24860 - RNA, 20 nt, Artificial Sequence
  HTT spacer sequence GTCN PAM
uguggcugggggguggggua

SEQ ID NO: 24861 - RNA, 20 nt, Artificial Sequence
  HTT spacer sequence GTCN PAM
uguggcuccuugucagggag

SEQ ID NO: 24862 - RNA, 20 nt, Artificial Sequence
  HTT spacer sequence GTCN PAM
gggaguccuguggcuggcaa

SEQ ID NO: 24863 - RNA, 20 nt, Artificial Sequence
  HTT spacer sequence GTCN PAM
uguggcuggcaaggagagaa

SEQ ID NO: 24864 - RNA, 20 nt, Artificial Sequence
  HTT spacer sequence GTCN PAM
uguggcuggguugggaggga

SEQ ID NO: 24865 - RNA, 20 nt, Artificial Sequence
  HTT spacer sequence GTCN PAM
uguggcuggggucucauccu

SEQ ID NO: 24866 - RNA, 20 nt, Artificial Sequence
  HTT spacer sequence GTCN PAM
cauccugugccuaacagugu

SEQ ID NO: 24867 - RNA, 20 nt, Artificial Sequence
  HTT spacer sequence GTCN PAM
agaggugccgagaccagcuc

SEQ ID NO: 24868 - RNA, 20 nt, Artificial Sequence
  HTT spacer sequence GTCN PAM
cggcaccucuggacacuguu

SEQ ID NO: 24869 - RNA, 20 nt, Artificial Sequence
  HTT spacer sequence GTCN PAM
gggagacccuaacccagcag

SEQ ID NO: 24870 - RNA, 20 nt, Artificial Sequence
  HTT spacer sequence GTCN PAM
ccccgacugagcuggucucg

SEQ ID NO: 24871 - RNA, 20 nt, Artificial Sequence
  HTT spacer sequence GTCN PAM
uuaauuccucuagcgcugcu

SEQ ID NO: 24872 - RNA, 20 nt, Artificial Sequence
  HTT spacer sequence GTCN PAM
cacagccuuuagagcugaga

SEQ ID NO: 24873 - RNA, 20 nt, Artificial Sequence
  HTT spacer sequence GTCN PAM
uuagcauuguuucuauagau

SEQ ID NO: 24874 - RNA, 20 nt, Artificial Sequence
  HTT spacer sequence GTCN PAM
uuaaggcacagaucgcucau

SEQ ID NO: 24875 - RNA, 20 nt, Artificial Sequence
  HTT spacer sequence GTCN PAM
acccacaaccuuccagugug

SEQ ID NO: 24876 - RNA, 20 nt, Artificial Sequence
  HTT spacer sequence GTCN PAM
cguguaaauucccugggagg

SEQ ID NO: 24877 - RNA, 20 nt, Artificial Sequence
  HTT spacer sequence GTCN PAM
guuucucagaggcuuaucgc

SEQ ID NO: 24878 - RNA, 20 nt, Artificial Sequence
  HTT spacer sequence GTCN PAM
gagcuacgccugggcaaaua

SEQ ID NO: 24879 - RNA, 20 nt, Artificial Sequence
  HTT spacer sequence GTCN PAM
ccgacucauagugcuugcuc

SEQ ID NO: 24880 - RNA, 20 nt, Artificial Sequence
  HTT spacer sequence GTCN PAM
gggacucugucagagcuacg

SEQ ID NO: 24881 - RNA, 20 nt, Artificial Sequence
  HTT spacer sequence GTCN PAM
uggcucagagcauaguuuug

SEQ ID NO: 24882 - RNA, 20 nt, Artificial Sequence
  HTT spacer sequence GTCN PAM
ccaagauaaugcgacuagcu

SEQ ID NO: 24883 - RNA, 20 nt, Artificial Sequence
  HTT spacer sequence GTCN PAM
cauuaucuuggugacuaugu

SEQ ID NO: 24884 - RNA, 20 nt, Artificial Sequence
  HTT spacer sequence GTCN PAM
ccccuuuucaauuuuaggau

SEQ ID NO: 24885 - RNA, 20 nt, Artificial Sequence
  HTT spacer sequence GTCN PAM
uagaggcccaugagaaagua

SEQ ID NO: 24886 - RNA, 20 nt, Artificial Sequence
  HTT spacer sequence GTCN PAM
uguccaguuaaauugcagau

SEQ ID NO: 24887 - RNA, 20 nt, Artificial Sequence
  HTT spacer sequence GTCN PAM
aguuaaauugcagauauuuc

SEQ ID NO: 24888 - RNA, 20 nt, Artificial Sequence
  HTT spacer sequence GTCN PAM
ugagaacuucgugacauuag

SEQ ID NO: 24889 - RNA, 20 nt, Artificial Sequence
  HTT spacer sequence GTCN PAM
cgaaguucucaggacuggaa

SEQ ID NO: 24890 - RNA, 20 nt, Artificial Sequence
  HTT spacer sequence GTCN PAM
ugcuaaugucacgaaguucu

SEQ ID NO: 24891 - RNA, 20 nt, Artificial Sequence
  HTT spacer sequence GTCN PAM
uuuguugauuuuuuuuuaac

SEQ ID NO: 24892 - RNA, 20 nt, Artificial Sequence
  HTT spacer sequence GTCN PAM
ccaaauacugugggcagagu

SEQ ID NO: 24893 - RNA, 20 nt, Artificial Sequence
  HTT spacer sequence GTCN PAM
ucuccgcaaugguggaggcc

SEQ ID NO: 24894 - RNA, 20 nt, Artificial Sequence
  HTT spacer sequence GTCN PAM
ccugagugaagguuauaaag

SEQ ID NO: 24895 - RNA, 20 nt, Artificial Sequence
  HTT spacer sequence GTCN PAM
auuugcuucuuuauaaccuu

SEQ ID NO: 24896 - RNA, 20 nt, Artificial Sequence
  HTT spacer sequence GTCN PAM
guaaacugcucuugaguguc

SEQ ID NO: 24897 - RNA, 20 nt, Artificial Sequence
  HTT spacer sequence GTCN PAM
caaauuugggguacuucagu

SEQ ID NO: 24898 - RNA, 20 nt, Artificial Sequence
  HTT spacer sequence GTCN PAM
aaguagauaaaagaugaagc

SEQ ID NO: 24899 - RNA, 20 nt, Artificial Sequence
  HTT spacer sequence GTCN PAM
agcucccccaccauucggcg

SEQ ID NO: 24900 - RNA, 20 nt, Artificial Sequence
  HTT spacer sequence GTCN PAM
gccgaauggugggggagcuu

SEQ ID NO: 24901 - RNA, 20 nt, Artificial Sequence
  HTT spacer sequence GTCN PAM
uucuugagugcuggcagaug

SEQ ID NO: 24902 - RNA, 20 nt, Artificial Sequence
  HTT spacer sequence GTCN PAM
ccagcauguacucaagauag

SEQ ID NO: 24903 - RNA, 20 nt, Artificial Sequence
  HTT spacer sequence GTCN PAM
aucuugaguacaugcuggag

SEQ ID NO: 24904 - RNA, 20 nt, Artificial Sequence
  HTT spacer sequence GTCN PAM
agaagcugagggaucaucug

SEQ ID NO: 24905 - RNA, 20 nt, Artificial Sequence
  HTT spacer sequence GTCN PAM
cugugacccugcagaugcag

SEQ ID NO: 24906 - RNA, 20 nt, Artificial Sequence
  HTT spacer sequence GTCN PAM
cagagacccaugcgggcuca

SEQ ID NO: 24907 - RNA, 20 nt, Artificial Sequence
  HTT spacer sequence GTCN PAM
cugggcacggcugcaucugc

SEQ ID NO: 24908 - RNA, 20 nt, Artificial Sequence
  HTT spacer sequence GTCN PAM
gccacccagggccuggcccu

SEQ ID NO: 24909 - RNA, 20 nt, Artificial Sequence
  HTT spacer sequence GTCN PAM
gugucggccaugacuauggu

SEQ ID NO: 24910 - RNA, 20 nt, Artificial Sequence
  HTT spacer sequence GTCN PAM
gccaugacuauggugagucu

SEQ ID NO: 24911 - RNA, 20 nt, Artificial Sequence
  HTT spacer sequence GTCN PAM
uggccgacacagacagaggg

SEQ ID NO: 24912 - RNA, 20 nt, Artificial Sequence
  HTT spacer sequence GTCN PAM
uguaggcuugagacugugcc

SEQ ID NO: 24913 - RNA, 20 nt, Artificial Sequence
  HTT spacer sequence GTCN PAM
caagccuacaagacucacca

SEQ ID NO: 24914 - RNA, 20 nt, Artificial Sequence
  HTT spacer sequence GTCN PAM
guugacaguuucuccuguug

SEQ ID NO: 24915 - RNA, 20 nt, Artificial Sequence
  HTT spacer sequence GTCN PAM
acugaccuacagagaacccg

SEQ ID NO: 24916 - RNA, 20 nt, Artificial Sequence
  HTT spacer sequence GTCN PAM
acaugcucgcuucagcacuu

SEQ ID NO: 24917 - RNA, 20 nt, Artificial Sequence
  HTT spacer sequence GTCN PAM
uuauuucauaucgcacgucc

SEQ ID NO: 24918 - RNA, 20 nt, Artificial Sequence
  HTT spacer sequence GTCN PAM
uuuccagagagccucacugc

SEQ ID NO: 24919 - RNA, 20 nt, Artificial Sequence
  HTT spacer sequence GTCN PAM
gauguuaagaugucuugcuu

SEQ ID NO: 24920 - RNA, 20 nt, Artificial Sequence
  HTT spacer sequence GTCN PAM
ugcuuccacccccacaggcu

SEQ ID NO: 24921 - RNA, 20 nt, Artificial Sequence
  HTT spacer sequence GTCN PAM
aggaugaacacuccacucug

SEQ ID NO: 24922 - RNA, 20 nt, Artificial Sequence
  HTT spacer sequence GTCN PAM
aggacacaagccugaaaggc

SEQ ID NO: 24923 - RNA, 20 nt, Artificial Sequence
  HTT spacer sequence GTCN PAM
uugaccugcugcugcagcaa

SEQ ID NO: 24924 - RNA, 20 nt, Artificial Sequence
  HTT spacer sequence GTCN PAM
cuccgaagcugccuuucagg

SEQ ID NO: 24925 - RNA, 20 nt, Artificial Sequence
  HTT spacer sequence GTCN PAM
cuccuucugcagagcagcuu

SEQ ID NO: 24926 - RNA, 20 nt, Artificial Sequence
  HTT spacer sequence GTCN PAM
agguaggagcacaggguuua

SEQ ID NO: 24927 - RNA, 20 nt, Artificial Sequence
  HTT spacer sequence GTCN PAM
uucacaugcagggccuagag

SEQ ID NO: 24928 - RNA, 20 nt, Artificial Sequence
  HTT spacer sequence GTCN PAM
gucauucacaugcagggccu

SEQ ID NO: 24929 - RNA, 20 nt, Artificial Sequence
  HTT spacer sequence GTCN PAM
acaccucuaacucucgguuc

SEQ ID NO: 24930 - RNA, 20 nt, Artificial Sequence
  HTT spacer sequence GTCN PAM
gcaccuaggguuggaaacga

SEQ ID NO: 24931 - RNA, 20 nt, Artificial Sequence
  HTT spacer sequence GTCN PAM
ucccucuguaugucccuguc

SEQ ID NO: 24932 - RNA, 20 nt, Artificial Sequence
  HTT spacer sequence GTCN PAM
cugucaccgugagucaaaug

SEQ ID NO: 24933 - RNA, 20 nt, Artificial Sequence
  HTT spacer sequence GTCN PAM
ccgugagucaaaugcgggug

SEQ ID NO: 24934 - RNA, 20 nt, Artificial Sequence
  HTT spacer sequence GTCN PAM
aaugcgggugaugccuccuc

SEQ ID NO: 24935 - RNA, 20 nt, Artificial Sequence
  HTT spacer sequence GTCN PAM
cugagaggcuuagguaacac

SEQ ID NO: 24936 - RNA, 20 nt, Artificial Sequence
  HTT spacer sequence GTCN PAM
cgauauguguucauccaccc

SEQ ID NO: 24937 - RNA, 20 nt, Artificial Sequence
  HTT spacer sequence GTCN PAM
aggcacggugguauaugcuc

SEQ ID NO: 24938 - RNA, 20 nt, Artificial Sequence
  HTT spacer sequence GTCN PAM
cuaucuccuugagugagcau

SEQ ID NO: 24939 - RNA, 20 nt, Artificial Sequence
  HTT spacer sequence GTCN PAM
uuuggggugucggaacaaaa

SEQ ID NO: 24940 - RNA, 20 nt, Artificial Sequence
  HTT spacer sequence GTCN PAM
gaacaaaaugucggaacuuc

SEQ ID NO: 24941 - RNA, 20 nt, Artificial Sequence
  HTT spacer sequence GTCN PAM
gaacuucucuuuccaaugca

SEQ ID NO: 24942 - RNA, 20 nt, Artificial Sequence
  HTT spacer sequence GTCN PAM
acugccaaucacaguacauu

SEQ ID NO: 24943 - RNA, 20 nt, Artificial Sequence
  HTT spacer sequence GTCN PAM
ggguuuuuauugugcuuaau

SEQ ID NO: 24944 - RNA, 20 nt, Artificial Sequence
  HTT spacer sequence GTCN PAM
acuuuugcucagcuguuuau

SEQ ID NO: 24945 - RNA, 20 nt, Artificial Sequence
  HTT spacer sequence GTCN PAM
caugggauaugacauuuaua

SEQ ID NO: 24946 - RNA, 20 nt, Artificial Sequence
  HTT spacer sequence GTCN PAM
uaucccaugagacucugcuu

SEQ ID NO: 24947 - RNA, 20 nt, Artificial Sequence
  HTT spacer sequence GTCN PAM
ugaguugauacuuuuguaug

SEQ ID NO: 24948 - RNA, 20 nt, Artificial Sequence
  HTT spacer sequence GTCN PAM
ucaucuauagagauacugaa

SEQ ID NO: 24949 - RNA, 20 nt, Artificial Sequence
  HTT spacer sequence GTCN PAM
gaugcaguguucaugccugu

SEQ ID NO: 24950 - RNA, 20 nt, Artificial Sequence
  HTT spacer sequence GTCN PAM
caaacucccagguucaagug

SEQ ID NO: 24951 - RNA, 20 nt, Artificial Sequence
  HTT spacer sequence GTCN PAM
uaaagaaaaaaaucagccaa

SEQ ID NO: 24952 - RNA, 20 nt, Artificial Sequence
  HTT spacer sequence GTCN PAM
cagcuacuugggaggcugag

SEQ ID NO: 24953 - RNA, 20 nt, Artificial Sequence
  HTT spacer sequence GTCN PAM
caugagccuggaagaucaag

SEQ ID NO: 24954 - RNA, 20 nt, Artificial Sequence
  HTT spacer sequence GTCN PAM
caaaaaaacaaaacugcaaa

SEQ ID NO: 24955 - RNA, 20 nt, Artificial Sequence
  HTT spacer sequence GTCN PAM
caaaacagugccauuguuag

SEQ ID NO: 24956 - RNA, 20 nt, Artificial Sequence
  HTT spacer sequence GTCN PAM
aacaauggcacuguuuugug

SEQ ID NO: 24957 - RNA, 20 nt, Artificial Sequence
  HTT spacer sequence GTCN PAM
auaaggauuguaaaucucuu

SEQ ID NO: 24958 - RNA, 20 nt, Artificial Sequence
  HTT spacer sequence GTCN PAM
ucuaaguuuuccuguggucu

SEQ ID NO: 24959 - RNA, 20 nt, Artificial Sequence
  HTT spacer sequence GTCN PAM
gauauacugcuuccaucucc

SEQ ID NO: 24960 - RNA, 20 nt, Artificial Sequence
  HTT spacer sequence GTCN PAM
gauuuaguguauauuuuaua

SEQ ID NO: 24961 - RNA, 20 nt, Artificial Sequence
  HTT spacer sequence GTCN PAM
aguauuucuuauauaauauu

SEQ ID NO: 24962 - RNA, 20 nt, Artificial Sequence
  HTT spacer sequence GTCN PAM
gaugggaaaagcaaauaauu

SEQ ID NO: 24963 - RNA, 20 nt, Artificial Sequence
  HTT spacer sequence GTCN PAM
ugagccgucacuuaugggca

SEQ ID NO: 24964 - RNA, 20 nt, Artificial Sequence
  HTT spacer sequence GTCN PAM
cuuaugggcacguggaaucu

SEQ ID NO: 24965 - RNA, 20 nt, Artificial Sequence
  HTT spacer sequence GTCN PAM
gauuccacgugcccauaagu

SEQ ID NO: 24966 - RNA, 20 nt, Artificial Sequence
  HTT spacer sequence GTCN PAM
ucucccaacucugugccggg

SEQ ID NO: 24967 - RNA, 20 nt, Artificial Sequence
  HTT spacer sequence GTCN PAM
auaaagcuccugucuucucc

SEQ ID NO: 24968 - RNA, 20 nt, Artificial Sequence
  HTT spacer sequence GTCN PAM
uugcuaagucccaggaguga

SEQ ID NO: 24969 - RNA, 20 nt, Artificial Sequence
  HTT spacer sequence GTCN PAM
caggagugaaagggugagac

SEQ ID NO: 24970 - RNA, 20 nt, Artificial Sequence
  HTT spacer sequence GTCN PAM
cacccuuucacuccugggac

SEQ ID NO: 24971 - RNA, 20 nt, Artificial Sequence
  HTT spacer sequence GTCN PAM
acgcacccacacucgugugc

SEQ ID NO: 24972 - RNA, 20 nt, Artificial Sequence
  HTT spacer sequence GTCN PAM
ugaaaaggccugcaggcuuu

SEQ ID NO: 24973 - RNA, 20 nt, Artificial Sequence
  HTT spacer sequence GTCN PAM
uuccaggauuacugcaaucc

SEQ ID NO: 24974 - RNA, 20 nt, Artificial Sequence
  HTT spacer sequence GTCN PAM
cacauccauacccuuuuuuc

SEQ ID NO: 24975 - RNA, 20 nt, Artificial Sequence
  HTT spacer sequence GTCN PAM
uaagaaaaucagcaauuaag

SEQ ID NO: 24976 - RNA, 20 nt, Artificial Sequence
  HTT spacer sequence GTCN PAM
aaagaagauggaguaagaua

SEQ ID NO: 24977 - RNA, 20 nt, Artificial Sequence
  HTT spacer sequence GTCN PAM
caugguaauuuaauuaagaa

SEQ ID NO: 24978 - RNA, 20 nt, Artificial Sequence
  HTT spacer sequence GTCN PAM
gcaagauuuauaaaggaaau

SEQ ID NO: 24979 - RNA, 20 nt, Artificial Sequence
  HTT spacer sequence GTCN PAM
aauggguucucuuacucuaa

SEQ ID NO: 24980 - RNA, 20 nt, Artificial Sequence
  HTT spacer sequence GTCN PAM
caagguuaauggucaaaugg

SEQ ID NO: 24981 - RNA, 20 nt, Artificial Sequence
  HTT spacer sequence GTCN PAM
uuugaaagagaaugucccaa

SEQ ID NO: 24982 - RNA, 20 nt, Artificial Sequence
  HTT spacer sequence GTCN PAM
agguuauugugacuggacuc

SEQ ID NO: 24983 - RNA, 20 nt, Artificial Sequence
  HTT spacer sequence GTCN PAM
caauaaccuagacucagaaa

SEQ ID NO: 24984 - RNA, 20 nt, Artificial Sequence
  HTT spacer sequence GTCN PAM
agucacaauaaccuagacuc

SEQ ID NO: 24985 - RNA, 20 nt, Artificial Sequence
  HTT spacer sequence GTCN PAM
aaguauaagcugauuacgua

SEQ ID NO: 24986 - RNA, 20 nt, Artificial Sequence
  HTT spacer sequence GTCN PAM
ugcaggccaucccaagucug

SEQ ID NO: 24987 - RNA, 20 nt, Artificial Sequence
  HTT spacer sequence GTCN PAM
guggcagcuacucaacacua

SEQ ID NO: 24988 - RNA, 20 nt, Artificial Sequence
  HTT spacer sequence GTCN PAM
ggccugcaccugcuuuugua

SEQ ID NO: 24989 - RNA, 20 nt, Artificial Sequence
  HTT spacer sequence GTCN PAM
ggucuggccugcaccugcuu

SEQ ID NO: 24990 - RNA, 20 nt, Artificial Sequence
  HTT spacer sequence GTCN PAM
gcaaaccacagugcacaggu

SEQ ID NO: 24991 - RNA, 20 nt, Artificial Sequence
  HTT spacer sequence GTCN PAM
cacuuuuagcucuucugaug

SEQ ID NO: 24992 - RNA, 20 nt, Artificial Sequence
  HTT spacer sequence GTCN PAM
gauuuugaaaaaaagaaaca

SEQ ID NO: 24993 - RNA, 20 nt, Artificial Sequence
  HTT spacer sequence GTCN PAM
cacaugauuuggaauauacu

SEQ ID NO: 24994 - RNA, 20 nt, Artificial Sequence
  HTT spacer sequence GTCN PAM
ccaacccccaggcugcagag

SEQ ID NO: 24995 - RNA, 20 nt, Artificial Sequence
  HTT spacer sequence GTCN PAM
auggguccccaacccccagg

SEQ ID NO: 24996 - RNA, 20 nt, Artificial Sequence
  HTT spacer sequence GTCN PAM
ccaacccccaggcugcagag

SEQ ID NO: 24997 - RNA, 20 nt, Artificial Sequence
  HTT spacer sequence GTCN PAM
auggccuguuaggaaccagg

SEQ ID NO: 24998 - RNA, 20 nt, Artificial Sequence
  HTT spacer sequence GTCN PAM
gaucaguggcagcauuagau

SEQ ID NO: 24999 - RNA, 20 nt, Artificial Sequence
  HTT spacer sequence GTCN PAM
agguugugcgcuccuuauga

SEQ ID NO: 25000 - RNA, 20 nt, Artificial Sequence
  HTT spacer sequence GTCN PAM
cgucuugaaaccauccccug

SEQ ID NO: 25001 - RNA, 20 nt, Artificial Sequence
  HTT spacer sequence GTCN PAM
ugaaaccauccccuggcccu

SEQ ID NO: 25002 - RNA, 20 nt, Artificial Sequence
  HTT spacer sequence GTCN PAM
cccaugaaaccagucucugg

SEQ ID NO: 25003 - RNA, 20 nt, Artificial Sequence
  HTT spacer sequence GTCN PAM
cuggugccagaaagguuggg

SEQ ID NO: 25004 - RNA, 20 nt, Artificial Sequence
  HTT spacer sequence GTCN PAM
gguagcucuuucucaguggc

SEQ ID NO: 25005 - RNA, 20 nt, Artificial Sequence
  HTT spacer sequence GTCN PAM
agcugacucuccccuccgug

SEQ ID NO: 25006 - RNA, 20 nt, Artificial Sequence
  HTT spacer sequence GTCN PAM
gcuugacacacauuuaaaaa

SEQ ID NO: 25007 - RNA, 20 nt, Artificial Sequence
  HTT spacer sequence GTCN PAM
ccaguuuugggaaauagaga

SEQ ID NO: 25008 - RNA, 20 nt, Artificial Sequence
  HTT spacer sequence GTCN PAM
augaaguccuauuaaaaaca

SEQ ID NO: 25009 - RNA, 20 nt, Artificial Sequence
  HTT spacer sequence GTCN PAM
uauuaaaaacaacaaaaaag

SEQ ID NO: 25010 - RNA, 20 nt, Artificial Sequence
  HTT spacer sequence GTCN PAM
gaguuuauaaaaugcauccu

SEQ ID NO: 25011 - RNA, 20 nt, Artificial Sequence
  HTT spacer sequence GTCN PAM
guucauaaaccuagaaacag

SEQ ID NO: 25012 - RNA, 20 nt, Artificial Sequence
  HTT spacer sequence GTCN PAM
uggugcuguguaugauguaa

SEQ ID NO: 25013 - RNA, 20 nt, Artificial Sequence
  HTT spacer sequence GTCN PAM
caacauuguggucuuggugc

SEQ ID NO: 25014 - RNA, 20 nt, Artificial Sequence
  HTT spacer sequence GTCN PAM
ggguuugcagaagcucgggu

SEQ ID NO: 25015 - RNA, 20 nt, Artificial Sequence
  HTT spacer sequence GTCN PAM
ggggcauugggcagcucacc

SEQ ID NO: 25016 - RNA, 20 nt, Artificial Sequence
  HTT spacer sequence GTCN PAM
gguggccgaagccguagugg

SEQ ID NO: 25017 - RNA, 20 nt, Artificial Sequence
  HTT spacer sequence GTCN PAM
acucuuacaauuaacuuugc

SEQ ID NO: 25018 - RNA, 20 nt, Artificial Sequence
  HTT spacer sequence GTCN PAM
gcauuccaucuuccuugcca

SEQ ID NO: 25019 - RNA, 20 nt, Artificial Sequence
  HTT spacer sequence GTCN PAM
caaacuccugggcugaagcg

SEQ ID NO: 25020 - RNA, 20 nt, Artificial Sequence
  HTT spacer sequence GTCN PAM
cacuuggccagguugucuca

SEQ ID NO: 25021 - RNA, 20 nt, Artificial Sequence
  HTT spacer sequence GTCN PAM
cuacaaaaaaaaaaaaaaaa

SEQ ID NO: 25022 - RNA, 20 nt, Artificial Sequence
  HTT spacer sequence GTCN PAM
cagcugcuuuggaggcugag

SEQ ID NO: 25023 - RNA, 20 nt, Artificial Sequence
  HTT spacer sequence GTCN PAM
ccaggcucagugcagcugcc

SEQ ID NO: 25024 - RNA, 20 nt, Artificial Sequence
  HTT spacer sequence GTCN PAM
caaaauaaauuuaaaaauaa

SEQ ID NO: 25025 - RNA, 20 nt, Artificial Sequence
  HTT spacer sequence GTCN PAM
ucagagggaucugagaguuc

SEQ ID NO: 25026 - RNA, 20 nt, Artificial Sequence
  HTT spacer sequence GTCN PAM
gagggaucugagaguuccuu

SEQ ID NO: 25027 - RNA, 20 nt, Artificial Sequence
  HTT spacer sequence GTCN PAM
ggccaggaaggaacucucag

SEQ ID NO: 25028 - RNA, 20 nt, Artificial Sequence
  HTT spacer sequence GTCN PAM
guccccagcucugcgucugc

SEQ ID NO: 25029 - RNA, 20 nt, Artificial Sequence
  HTT spacer sequence GTCN PAM
ccagcucugcgucugccucc

SEQ ID NO: 25030 - RNA, 20 nt, Artificial Sequence
  HTT spacer sequence GTCN PAM
gccuccacugcccagucacc

SEQ ID NO: 25031 - RNA, 20 nt, Artificial Sequence
  HTT spacer sequence GTCN PAM
ccuccucuccaugcucuugg

SEQ ID NO: 25032 - RNA, 20 nt, Artificial Sequence
  HTT spacer sequence GTCN PAM
ugucuggcaugagagcugcc

SEQ ID NO: 25033 - RNA, 20 nt, Artificial Sequence
  HTT spacer sequence GTCN PAM
ggcaugagagcugccuuugg

SEQ ID NO: 25034 - RNA, 20 nt, Artificial Sequence
  HTT spacer sequence GTCN PAM
ggugccuagcaggcuaugga

SEQ ID NO: 25035 - RNA, 20 nt, Artificial Sequence
  HTT spacer sequence GTCN PAM
gcagaaguuuauccauagcc

SEQ ID NO: 25036 - RNA, 20 nt, Artificial Sequence
  HTT spacer sequence GTCN PAM
guguagugcacagugugugu

SEQ ID NO: 25037 - RNA, 20 nt, Artificial Sequence
  HTT spacer sequence GTCN PAM
gauucucucuaauguggagg

SEQ ID NO: 25038 - RNA, 20 nt, Artificial Sequence
  HTT spacer sequence GTCN PAM
uacugcugccucgugugaac

SEQ ID NO: 25039 - RNA, 20 nt, Artificial Sequence
  HTT spacer sequence GTCN PAM
uuuacacggaagaauuuuuu

SEQ ID NO: 25040 - RNA, 20 nt, Artificial Sequence
  HTT spacer sequence GTCN PAM
aguauaacuuuucauuagcg

SEQ ID NO: 25041 - RNA, 20 nt, Artificial Sequence
  HTT spacer sequence GTCN PAM
gcuaaauaaucugagauuuc

SEQ ID NO: 25042 - RNA, 20 nt, Artificial Sequence
  HTT spacer sequence GTCN PAM
uaucuuuagaacuauauauu

SEQ ID NO: 25043 - RNA, 20 nt, Artificial Sequence
  HTT spacer sequence GTCN PAM
cuuucugugauuugcagcug

SEQ ID NO: 25044 - RNA, 20 nt, Artificial Sequence
  HTT spacer sequence GTCN PAM
uuucaagaaaacaaaaaggu

SEQ ID NO: 25045 - RNA, 20 nt, Artificial Sequence
  HTT spacer sequence GTCN PAM
uguguugaaucuuacugauu

SEQ ID NO: 25046 - RNA, 20 nt, Artificial Sequence
  HTT spacer sequence GTCN PAM
aauacaguauuacaagaaau

SEQ ID NO: 25047 - RNA, 20 nt, Artificial Sequence
  HTT spacer sequence GTCN PAM
uaaauuuugaacgcaucaua

SEQ ID NO: 25048 - RNA, 20 nt, Artificial Sequence
  HTT spacer sequence GTCN PAM
gcagacuuuuuuuguaaagg

SEQ ID NO: 25049 - RNA, 20 nt, Artificial Sequence
  HTT spacer sequence GTCN PAM
gcugaccccgaacauuagaa

SEQ ID NO: 25050 - RNA, 20 nt, Artificial Sequence
  HTT spacer sequence GTCN PAM
cuuuacaaaaaaagucugcu

SEQ ID NO: 25051 - RNA, 20 nt, Artificial Sequence
  HTT spacer sequence GTCN PAM
cuuuugcaacauucagcucu

SEQ ID NO: 25052 - RNA, 20 nt, Artificial Sequence
  HTT spacer sequence GTCN PAM
cagggcagagcugaauguug

SEQ ID NO: 25053 - RNA, 20 nt, Artificial Sequence
  HTT spacer sequence GTCN PAM
uuacaacugcauuccuguca

SEQ ID NO: 25054 - RNA, 20 nt, Artificial Sequence
  HTT spacer sequence GTCN PAM
guuucuguaaguaaaguucu

SEQ ID NO: 25055 - RNA, 20 nt, Artificial Sequence
  HTT spacer sequence GTCN PAM
ggaauauuauuaaguagcuu

SEQ ID NO: 25056 - RNA, 20 nt, Artificial Sequence
  HTT spacer sequence GTCN PAM
acauagugagacccggucuc

SEQ ID NO: 25057 - RNA, 20 nt, Artificial Sequence
  HTT spacer sequence GTCN PAM
cacuauguugaccaggcugg

SEQ ID NO: 25058 - RNA, 20 nt, Artificial Sequence
  HTT spacer sequence GTCN PAM
cuaccaaaacaaaacaaaac

SEQ ID NO: 25059 - RNA, 20 nt, Artificial Sequence
  HTT spacer sequence GTCN PAM
cagugagcuguagucaugcc

SEQ ID NO: 25060 - RNA, 20 nt, Artificial Sequence
  HTT spacer sequence GTCN PAM
ugccacugcacuccagccua

SEQ ID NO: 25061 - RNA, 20 nt, Artificial Sequence
  HTT spacer sequence GTCN PAM
cauucuguugccuaggcugg

SEQ ID NO: 25062 - RNA, 20 nt, Artificial Sequence
  HTT spacer sequence GTCN PAM
uaaaaaaaaaaaguuuccuu

SEQ ID NO: 25063 - RNA, 20 nt, Artificial Sequence
  HTT spacer sequence GTCN PAM
aaauuaaaauaacccaacaa

SEQ ID NO: 25064 - RNA, 20 nt, Artificial Sequence
  HTT spacer sequence GTCN PAM
cuuucuauuuugaaaucuua

SEQ ID NO: 25065 - RNA, 20 nt, Artificial Sequence
  HTT spacer sequence GTCN PAM
uuuaagauuucaaaauagaa

SEQ ID NO: 25066 - RNA, 20 nt, Artificial Sequence
  HTT spacer sequence GTCN PAM
ugauuugaguauuuaauuga

SEQ ID NO: 25067 - RNA, 20 nt, Artificial Sequence
  HTT spacer sequence GTCN PAM
ucauaguaugagauacuuaa

SEQ ID NO: 25068 - RNA, 20 nt, Artificial Sequence
  HTT spacer sequence GTCN PAM
auauucuugaauuaggagag

SEQ ID NO: 25069 - RNA, 20 nt, Artificial Sequence
  HTT spacer sequence GTCN PAM
caaaaucucuccuaauucaa

SEQ ID NO: 25070 - RNA, 20 nt, Artificial Sequence
  HTT spacer sequence GTCN PAM
cacgucccaaaaucucuccu

SEQ ID NO: 25071 - RNA, 20 nt, Artificial Sequence
  HTT spacer sequence GTCN PAM
gcguaacuuagucacacguc

SEQ ID NO: 25072 - RNA, 20 nt, Artificial Sequence
  HTT spacer sequence GTCN PAM
cuuuuuccaguggcggugag

SEQ ID NO: 25073 - RNA, 20 nt, Artificial Sequence
  HTT spacer sequence GTCN PAM
ucuucguucucaccgccacu

SEQ ID NO: 25074 - RNA, 20 nt, Artificial Sequence
  HTT spacer sequence GTCN PAM
cagccagaagaggauaaacu

SEQ ID NO: 25075 - RNA, 20 nt, Artificial Sequence
  HTT spacer sequence GTCN PAM
cuuuuaagccuuuuugguau

SEQ ID NO: 25076 - RNA, 20 nt, Artificial Sequence
  HTT spacer sequence GTCN PAM
ucaaacucuucuguuauagc

SEQ ID NO: 25077 - RNA, 20 nt, Artificial Sequence
  HTT spacer sequence GTCN PAM
uauaauuugggcagauuuca

SEQ ID NO: 25078 - RNA, 20 nt, Artificial Sequence
  HTT spacer sequence GTCN PAM
uggagccucucuucuggugg

SEQ ID NO: 25079 - RNA, 20 nt, Artificial Sequence
  HTT spacer sequence GTCN PAM
ccaggguaauuuccucaaag

SEQ ID NO: 25080 - RNA, 20 nt, Artificial Sequence
  HTT spacer sequence GTCN PAM
gaaguaugauaacuuccaua

SEQ ID NO: 25081 - RNA, 20 nt, Artificial Sequence
  HTT spacer sequence GTCN PAM
uuuaaugacacucacaugug

SEQ ID NO: 25082 - RNA, 20 nt, Artificial Sequence
  HTT spacer sequence GTCN PAM
uuaaaugacacuaucaaaau

SEQ ID NO: 25083 - RNA, 20 nt, Artificial Sequence
  HTT spacer sequence GTCN PAM
uaauaugauuuaaaacugaa

SEQ ID NO: 25084 - RNA, 20 nt, Artificial Sequence
  HTT spacer sequence GTCN PAM
agaaaauuaaaagauaauaa

SEQ ID NO: 25085 - RNA, 20 nt, Artificial Sequence
  HTT spacer sequence GTCN PAM
cuuucauuuuauuaucuuuu

SEQ ID NO: 25086 - RNA, 20 nt, Artificial Sequence
  HTT spacer sequence GTCN PAM
uuggagcuaugacaugaaua

SEQ ID NO: 25087 - RNA, 20 nt, Artificial Sequence
  HTT spacer sequence GTCN PAM
uagcuccaaugacacaccag

SEQ ID NO: 25088 - RNA, 20 nt, Artificial Sequence
  HTT spacer sequence GTCN PAM
auaaaccuauauggaaaaag

SEQ ID NO: 25089 - RNA, 20 nt, Artificial Sequence
  HTT spacer sequence GTCN PAM
uuauuuuuagcaaacuaaaa

SEQ ID NO: 25090 - RNA, 20 nt, Artificial Sequence
  HTT spacer sequence GTCN PAM
uccuccaaggcuucuucuuc

SEQ ID NO: 25091 - RNA, 20 nt, Artificial Sequence
  HTT spacer sequence GTCN PAM
gcagcucugccuuaacaggu

SEQ ID NO: 25092 - RNA, 20 nt, Artificial Sequence
  HTT spacer sequence GTCN PAM
acaccagcggcuaacuagug

SEQ ID NO: 25093 - RNA, 20 nt, Artificial Sequence
  HTT spacer sequence GTCN PAM
gccuuccaccccuugcccuu

SEQ ID NO: 25094 - RNA, 20 nt, Artificial Sequence
  HTT spacer sequence GTCN PAM
cccugcaccugguggacagc

SEQ ID NO: 25095 - RNA, 20 nt, Artificial Sequence
  HTT spacer sequence GTCN PAM
accaggugcagggggacgag

SEQ ID NO: 25096 - RNA, 20 nt, Artificial Sequence
  HTT spacer sequence GTCN PAM
ugcuguccaccaggugcagg

SEQ ID NO: 25097 - RNA, 20 nt, Artificial Sequence
  HTT spacer sequence GTCN PAM
gugguguuugcaucauauau

SEQ ID NO: 25098 - RNA, 20 nt, Artificial Sequence
  HTT spacer sequence GTCN PAM
aaacaucucaugaguuggau

SEQ ID NO: 25099 - RNA, 20 nt, Artificial Sequence
  HTT spacer sequence GTCN PAM
cacacugucacccagugcag

SEQ ID NO: 25100 - RNA, 20 nt, Artificial Sequence
  HTT spacer sequence GTCN PAM
cccagugcagauacccagug

SEQ ID NO: 25101 - RNA, 20 nt, Artificial Sequence
  HTT spacer sequence GTCN PAM
cuggagugcaguggugugcu

SEQ ID NO: 25102 - RNA, 20 nt, Artificial Sequence
  HTT spacer sequence GTCN PAM
cagcuacuugggaggcugag

SEQ ID NO: 25103 - RNA, 20 nt, Artificial Sequence
  HTT spacer sequence GTCN PAM
ccacaaaaaaauacaaaaau

SEQ ID NO: 25104 - RNA, 20 nt, Artificial Sequence
  HTT spacer sequence GTCN PAM
ggcuggucuugaacuccuga

SEQ ID NO: 25105 - RNA, 20 nt, Artificial Sequence
  HTT spacer sequence GTCN PAM
ugaacuccugaccucaagug

SEQ ID NO: 25106 - RNA, 20 nt, Artificial Sequence
  HTT spacer sequence GTCN PAM
ggaguucaagaccagccuga

SEQ ID NO: 25107 - RNA, 20 nt, Artificial Sequence
  HTT spacer sequence GTCN PAM
uacuuucaguuauagcuaaa

SEQ ID NO: 25108 - RNA, 20 nt, Artificial Sequence
  HTT spacer sequence GTCN PAM
guaagcaugugagcuuuaua

SEQ ID NO: 25109 - RNA, 20 nt, Artificial Sequence
  HTT spacer sequence GTCN PAM
cuccuggggcaguugggucg

SEQ ID NO: 25110 - RNA, 20 nt, Artificial Sequence
  HTT spacer sequence GTCN PAM
accuuuuugccauaauuuuu

SEQ ID NO: 25111 - RNA, 20 nt, Artificial Sequence
  HTT spacer sequence GTCN PAM
acaugaagcuguuggcagug

SEQ ID NO: 25112 - RNA, 20 nt, Artificial Sequence
  HTT spacer sequence GTCN PAM
acuaggaaaauguguuacag

SEQ ID NO: 25113 - RNA, 20 nt, Artificial Sequence
  HTT spacer sequence GTCN PAM
uauucuccuggaagauaaac

SEQ ID NO: 25114 - RNA, 20 nt, Artificial Sequence
  HTT spacer sequence GTCN PAM
agaucuugaauguggcuugg

SEQ ID NO: 25115 - RNA, 20 nt, Artificial Sequence
  HTT spacer sequence GTCN PAM
acucaucucucugggguggg

SEQ ID NO: 25116 - RNA, 20 nt, Artificial Sequence
  HTT spacer sequence GTCN PAM
gaaacaacugucaacucauc

SEQ ID NO: 25117 - RNA, 20 nt, Artificial Sequence
  HTT spacer sequence GTCN PAM
gugaccgccuagcuuugcgc

SEQ ID NO: 25118 - RNA, 20 nt, Artificial Sequence
  HTT spacer sequence GTCN PAM
cagacacgcaggcccucuaa

SEQ ID NO: 25119 - RNA, 20 nt, Artificial Sequence
  HTT spacer sequence GTCN PAM
ggggcgcaaagcuaggcggu

SEQ ID NO: 25120 - RNA, 20 nt, Artificial Sequence
  HTT spacer sequence GTCN PAM
uuauauauugcuccagcuaa

SEQ ID NO: 25121 - RNA, 20 nt, Artificial Sequence
  HTT spacer sequence GTCN PAM
guuaagaacuugaacuucgg

SEQ ID NO: 25122 - RNA, 20 nt, Artificial Sequence
  HTT spacer sequence GTCN PAM
ugcauuucagcaucuucagg

SEQ ID NO: 25123 - RNA, 20 nt, Artificial Sequence
  HTT spacer sequence GTCN PAM
aauggcgagagaaaacauuc

SEQ ID NO: 25124 - RNA, 20 nt, Artificial Sequence
  HTT spacer sequence GTCN PAM
ucagccucagugaaggauga

SEQ ID NO: 25125 - RNA, 20 nt, Artificial Sequence
  HTT spacer sequence GTCN PAM
gcaggucaugacaucaucac

SEQ ID NO: 25126 - RNA, 20 nt, Artificial Sequence
  HTT spacer sequence GTCN PAM
ugacaucaucacagaacagc

SEQ ID NO: 25127 - RNA, 20 nt, Artificial Sequence
  HTT spacer sequence GTCN PAM
ugaccugcugacccuggagu

SEQ ID NO: 25128 - RNA, 20 nt, Artificial Sequence
  HTT spacer sequence GTCN PAM
cagcacacacugcaggcgga

SEQ ID NO: 25129 - RNA, 20 nt, Artificial Sequence
  HTT spacer sequence GTCN PAM
gccugcagugugugcuguga

SEQ ID NO: 25130 - RNA, 20 nt, Artificial Sequence
  HTT spacer sequence GTCN PAM
cagcuggccagauccacuga

SEQ ID NO: 25131 - RNA, 20 nt, Artificial Sequence
  HTT spacer sequence GTCN PAM
agucacagcuggccagaucc

SEQ ID NO: 25132 - RNA, 20 nt, Artificial Sequence
  HTT spacer sequence GTCN PAM
gcgccgucccaucugacccu

SEQ ID NO: 25133 - RNA, 20 nt, Artificial Sequence
  HTT spacer sequence GTCN PAM
caucugacccugccauggac

SEQ ID NO: 25134 - RNA, 20 nt, Artificial Sequence
  HTT spacer sequence GTCN PAM
gaugggacggcgcugaccug

SEQ ID NO: 25135 - RNA, 20 nt, Artificial Sequence
  HTT spacer sequence GTCN PAM
auggcagggucagaugggac

SEQ ID NO: 25136 - RNA, 20 nt, Artificial Sequence
  HTT spacer sequence GTCN PAM
caucauucagguccauggca

SEQ ID NO: 25137 - RNA, 20 nt, Artificial Sequence
  HTT spacer sequence GTCN PAM
cccaucagcgacagcuccca

SEQ ID NO: 25138 - RNA, 20 nt, Artificial Sequence
  HTT spacer sequence GTCN PAM
cugaugggcgacgaggccug

SEQ ID NO: 25139 - RNA, 20 nt, Artificial Sequence
  HTT spacer sequence GTCN PAM
gggagcugucgcugaugggc

SEQ ID NO: 25140 - RNA, 20 nt, Artificial Sequence
  HTT spacer sequence GTCN PAM
gaagggguaacagcugaauc

SEQ ID NO: 25141 - RNA, 20 nt, Artificial Sequence
  HTT spacer sequence GTCN PAM
ggccccucugcccacuuaca

SEQ ID NO: 25142 - RNA, 20 nt, Artificial Sequence
  HTT spacer sequence GTCN PAM
caaauaaaaaauaaaaaaaa

SEQ ID NO: 25143 - RNA, 20 nt, Artificial Sequence
  HTT spacer sequence GTCN PAM
cacuccauagugcaguggag

SEQ ID NO: 25144 - RNA, 20 nt, Artificial Sequence
  HTT spacer sequence GTCN PAM
cccaaagugcugggauuaca

SEQ ID NO: 25145 - RNA, 20 nt, Artificial Sequence
  HTT spacer sequence GTCN PAM
ggaguucgagaccagccugg

SEQ ID NO: 25146 - RNA, 20 nt, Artificial Sequence
  HTT spacer sequence GTCN PAM
cgaacuccugaccucaagug

SEQ ID NO: 25147 - RNA, 20 nt, Artificial Sequence
  HTT spacer sequence GTCN PAM
cuacuaaaaauacaaaaauu

SEQ ID NO: 25148 - RNA, 20 nt, Artificial Sequence
  HTT spacer sequence GTCN PAM
guagucccagcuguuaggga

SEQ ID NO: 25149 - RNA, 20 nt, Artificial Sequence
  HTT spacer sequence GTCN PAM
cagcuguuagggaggcugag

SEQ ID NO: 25150 - RNA, 20 nt, Artificial Sequence
  HTT spacer sequence GTCN PAM
cgaucucggcucauugcaac

SEQ ID NO: 25151 - RNA, 20 nt, Artificial Sequence
  HTT spacer sequence GTCN PAM
ugcucuguugcccgggcugg

SEQ ID NO: 25152 - RNA, 20 nt, Artificial Sequence
  HTT spacer sequence GTCN PAM
cuacugaaaauacaaacauu

SEQ ID NO: 25153 - RNA, 20 nt, Artificial Sequence
  HTT spacer sequence GTCN PAM
caaacuccugaccuuagaug

SEQ ID NO: 25154 - RNA, 20 nt, Artificial Sequence
  HTT spacer sequence GTCN PAM
ggaguuugagaccagccugg

SEQ ID NO: 25155 - RNA, 20 nt, Artificial Sequence
  HTT spacer sequence GTCN PAM
ccagggaagaacucaaaaga

SEQ ID NO: 25156 - RNA, 20 nt, Artificial Sequence
  HTT spacer sequence GTCN PAM
aggucuccagggaagaacuc

SEQ ID NO: 25157 - RNA, 20 nt, Artificial Sequence
  HTT spacer sequence GTCN PAM
auagggguauuagauaacaa

SEQ ID NO: 25158 - RNA, 20 nt, Artificial Sequence
  HTT spacer sequence GTCN PAM
agcucuccauuaaugaucua

SEQ ID NO: 25159 - RNA, 20 nt, Artificial Sequence
  HTT spacer sequence GTCN PAM
uuuguguugaacacugaggu

SEQ ID NO: 25160 - RNA, 20 nt, Artificial Sequence
  HTT spacer sequence GTCN PAM
uaaugaaaugugauuaauac

SEQ ID NO: 25161 - RNA, 20 nt, Artificial Sequence
  HTT spacer sequence GTCN PAM
aaaguucuuaaaauaaugca

SEQ ID NO: 25162 - RNA, 20 nt, Artificial Sequence
  HTT spacer sequence GTCN PAM
acuaacuuagagaugagaag

SEQ ID NO: 25163 - RNA, 20 nt, Artificial Sequence
  HTT spacer sequence GTCN PAM
aauaauguuugcuacaaguc

SEQ ID NO: 25164 - RNA, 20 nt, Artificial Sequence
  HTT spacer sequence GTCN PAM
auguugaguuuuauacucca

SEQ ID NO: 25165 - RNA, 20 nt, Artificial Sequence
  HTT spacer sequence GTCN PAM
uggaaucauugcuaccaccc

SEQ ID NO: 25166 - RNA, 20 nt, Artificial Sequence
  HTT spacer sequence GTCN PAM
cuggcaaccacgauucuucu

SEQ ID NO: 25167 - RNA, 20 nt, Artificial Sequence
  HTT spacer sequence GTCN PAM
ucugaauuugacuacuuugg

SEQ ID NO: 25168 - RNA, 20 nt, Artificial Sequence
  HTT spacer sequence GTCN PAM
aauucagaagacagaaagaa

SEQ ID NO: 25169 - RNA, 20 nt, Artificial Sequence
  HTT spacer sequence GTCN PAM
cacaguauuuguuuuacuua

SEQ ID NO: 25170 - RNA, 20 nt, Artificial Sequence
  HTT spacer sequence GTCN PAM
ccaaagcucaugcauguugu

SEQ ID NO: 25171 - RNA, 20 nt, Artificial Sequence
  HTT spacer sequence GTCN PAM
auggacacuuguauugcuuc

SEQ ID NO: 25172 - RNA, 20 nt, Artificial Sequence
  HTT spacer sequence GTCN PAM
auggacagaggaauggaaaa

SEQ ID NO: 25173 - RNA, 20 nt, Artificial Sequence
  HTT spacer sequence GTCN PAM
ccaggagcuaucuguacacc

SEQ ID NO: 25174 - RNA, 20 nt, Artificial Sequence
  HTT spacer sequence GTCN PAM
auuguucaguuuuuuuaggu

SEQ ID NO: 25175 - RNA, 20 nt, Artificial Sequence
  HTT spacer sequence GTCN PAM
uguguaauuuaccuaaaaaa

SEQ ID NO: 25176 - RNA, 20 nt, Artificial Sequence
  HTT spacer sequence GTCN PAM
acuugaaauguccuguguaa

SEQ ID NO: 25177 - RNA, 20 nt, Artificial Sequence
  HTT spacer sequence GTCN PAM
uugcaauuuaggagauaacc

SEQ ID NO: 25178 - RNA, 20 nt, Artificial Sequence
  HTT spacer sequence GTCN PAM
aaaagcuuuguccucauauu

SEQ ID NO: 25179 - RNA, 20 nt, Artificial Sequence
  HTT spacer sequence GTCN PAM
ucauauuuccaacuugcugu

SEQ ID NO: 25180 - RNA, 20 nt, Artificial Sequence
  HTT spacer sequence GTCN PAM
ucacaaacaaauuuuacagc

SEQ ID NO: 25181 - RNA, 20 nt, Artificial Sequence
  HTT spacer sequence GTCN PAM
acauuggaauuuuuuuggag

SEQ ID NO: 25182 - RNA, 20 nt, Artificial Sequence
  HTT spacer sequence GTCN PAM
uuuauuucaaggcacagaaa

SEQ ID NO: 25183 - RNA, 20 nt, Artificial Sequence
  HTT spacer sequence GTCN PAM
cuuggugaucacacuucaaa

SEQ ID NO: 25184 - RNA, 20 nt, Artificial Sequence
  HTT spacer sequence GTCN PAM
aacaccuaaacgguucaagg

SEQ ID NO: 25185 - RNA, 20 nt, Artificial Sequence
  HTT spacer sequence GTCN PAM
guaccgucuaacaccuaaac

SEQ ID NO: 25186 - RNA, 20 nt, Artificial Sequence
  HTT spacer sequence GTCN PAM
aaucugcaggcccaaauacu

SEQ ID NO: 25187 - RNA, 20 nt, Artificial Sequence
  HTT spacer sequence GTCN PAM
acauacccauggaagaguuc

SEQ ID NO: 25188 - RNA, 20 nt, Artificial Sequence
  HTT spacer sequence GTCN PAM
gaauacaaaccacuuuguag

SEQ ID NO: 25189 - RNA, 20 nt, Artificial Sequence
  HTT spacer sequence GTCN PAM
aggucugaauacaaaccacu

SEQ ID NO: 25190 - RNA, 20 nt, Artificial Sequence
  HTT spacer sequence GTCN PAM
uuugauacuguuuucugagu

SEQ ID NO: 25191 - RNA, 20 nt, Artificial Sequence
  HTT spacer sequence GTCN PAM
uuuucaucagcuauucagaa

SEQ ID NO: 25192 - RNA, 20 nt, Artificial Sequence
  HTT spacer sequence GTCN PAM
cuuaaucuugauuucucugu

SEQ ID NO: 25193 - RNA, 20 nt, Artificial Sequence
  HTT spacer sequence GTCN PAM
cugcaggcagccuucugaca

SEQ ID NO: 25194 - RNA, 20 nt, Artificial Sequence
  HTT spacer sequence GTCN PAM
gaaggcugccugcagugacu

SEQ ID NO: 25195 - RNA, 20 nt, Artificial Sequence
  HTT spacer sequence GTCN PAM
cucaccuuguuuucuugauc

SEQ ID NO: 25196 - RNA, 20 nt, Artificial Sequence
  HTT spacer sequence GTCN PAM
caagccuaugucccucaccu

SEQ ID NO: 25197 - RNA, 20 nt, Artificial Sequence
  HTT spacer sequence GTCN PAM
ucucaagccuaugucccuca

SEQ ID NO: 25198 - RNA, 20 nt, Artificial Sequence
  HTT spacer sequence GTCN PAM
acuuuauugcuuucccaucc

SEQ ID NO: 25199 - RNA, 20 nt, Artificial Sequence
  HTT spacer sequence GTCN PAM
ggggcacacucucaaaggag

SEQ ID NO: 25200 - RNA, 20 nt, Artificial Sequence
  HTT spacer sequence GTCN PAM
gauuucuuggaucauucauu

SEQ ID NO: 25201 - RNA, 20 nt, Artificial Sequence
  HTT spacer sequence GTCN PAM
cucuucauauuaucuuuuua

SEQ ID NO: 25202 - RNA, 20 nt, Artificial Sequence
  HTT spacer sequence GTCN PAM
ucacuuuuaauuccucaagg

SEQ ID NO: 25203 - RNA, 20 nt, Artificial Sequence
  HTT spacer sequence GTCN PAM
uugaggaauuaaaagugaag

SEQ ID NO: 25204 - RNA, 20 nt, Artificial Sequence
  HTT spacer sequence GTCN PAM
caucaaucagaauuauagcc

SEQ ID NO: 25205 - RNA, 20 nt, Artificial Sequence
  HTT spacer sequence GTCN PAM
uguagaagaccuuucaugcu

SEQ ID NO: 25206 - RNA, 20 nt, Artificial Sequence
  HTT spacer sequence GTCN PAM
ucuacaggacaagcagaagc

SEQ ID NO: 25207 - RNA, 20 nt, Artificial Sequence
  HTT spacer sequence GTCN PAM
acugccuucuuaccacgccc

SEQ ID NO: 25208 - RNA, 20 nt, Artificial Sequence
  HTT spacer sequence GTCN PAM
cagggcuguggcaggggaua

SEQ ID NO: 25209 - RNA, 20 nt, Artificial Sequence
  HTT spacer sequence GTCN PAM
ugcugccucugacuugucug

SEQ ID NO: 25210 - RNA, 20 nt, Artificial Sequence
  HTT spacer sequence GTCN PAM
gaggcagcaggacacagggu

SEQ ID NO: 25211 - RNA, 20 nt, Artificial Sequence
  HTT spacer sequence GTCN PAM
guuucugcuuggccaugguc

SEQ ID NO: 25212 - RNA, 20 nt, Artificial Sequence
  HTT spacer sequence GTCN PAM
cugugaggucaggugugcau

SEQ ID NO: 25213 - RNA, 20 nt, Artificial Sequence
  HTT spacer sequence GTCN PAM
ggugugcauaugggcacaaa

SEQ ID NO: 25214 - RNA, 20 nt, Artificial Sequence
  HTT spacer sequence GTCN PAM
cauacucaacaauacauuca

SEQ ID NO: 25215 - RNA, 20 nt, Artificial Sequence
  HTT spacer sequence GTCN PAM
uugucuccuuucuagccuug

SEQ ID NO: 25216 - RNA, 20 nt, Artificial Sequence
  HTT spacer sequence GTCN PAM
ccuuucuagccuugccgcau

SEQ ID NO: 25217 - RNA, 20 nt, Artificial Sequence
  HTT spacer sequence GTCN PAM
ccuuugaugcggcaaggcua

SEQ ID NO: 25218 - RNA, 20 nt, Artificial Sequence
  HTT spacer sequence GTCN PAM
aaugucaccuuugaugcggc

SEQ ID NO: 25219 - RNA, 20 nt, Artificial Sequence
  HTT spacer sequence GTCN PAM
acugaugaugacucugcacc

SEQ ID NO: 25220 - RNA, 20 nt, Artificial Sequence
  HTT spacer sequence GTCN PAM
ucaucaguggacuguccaau

SEQ ID NO: 25221 - RNA, 20 nt, Artificial Sequence
  HTT spacer sequence GTCN PAM
auuguguccgccuuuuaucu

SEQ ID NO: 25222 - RNA, 20 nt, Artificial Sequence
  HTT spacer sequence GTCN PAM
gccuuuuaucugcuucguuu

SEQ ID NO: 25223 - RNA, 20 nt, Artificial Sequence
  HTT spacer sequence GTCN PAM
gcuugguggccuguuuuugc

SEQ ID NO: 25224 - RNA, 20 nt, Artificial Sequence
  HTT spacer sequence GTCN PAM
gguuuuguucauuugaaaac

SEQ ID NO: 25225 - RNA, 20 nt, Artificial Sequence
  HTT spacer sequence GTCN PAM
ggaaccagcacugccaagaa

SEQ ID NO: 25226 - RNA, 20 nt, Artificial Sequence
  HTT spacer sequence GTCN PAM
gcgugaaggcccuggcccuc

SEQ ID NO: 25227 - RNA, 20 nt, Artificial Sequence
  HTT spacer sequence GTCN PAM
agaggaacuuuauagaguuu

SEQ ID NO: 25228 - RNA, 20 nt, Artificial Sequence
  HTT spacer sequence GTCN PAM
auacugaaauaguuuuuaca

SEQ ID NO: 25229 - RNA, 20 nt, Artificial Sequence
  HTT spacer sequence GTCN PAM
aauaucccaaaugaacucaa

SEQ ID NO: 25230 - RNA, 20 nt, Artificial Sequence
  HTT spacer sequence GTCN PAM
caguggcgcugagucgcacu

SEQ ID NO: 25231 - RNA, 20 nt, Artificial Sequence
  HTT spacer sequence GTCN PAM
cacucagccaggccaggcau

SEQ ID NO: 25232 - RNA, 20 nt, Artificial Sequence
  HTT spacer sequence GTCN PAM
ugguucccacucacccugag

SEQ ID NO: 25233 - RNA, 20 nt, Artificial Sequence
  HTT spacer sequence GTCN PAM
acugcugccucagccagucc

SEQ ID NO: 25234 - RNA, 20 nt, Artificial Sequence
  HTT spacer sequence GTCN PAM
ccaucgcgcccaugcuuacu

SEQ ID NO: 25235 - RNA, 20 nt, Artificial Sequence
  HTT spacer sequence GTCN PAM
gauaauaaaucugauuaaaa

SEQ ID NO: 25236 - RNA, 20 nt, Artificial Sequence
  HTT spacer sequence GTCN PAM
gugguauugaggacauauug

SEQ ID NO: 25237 - RNA, 20 nt, Artificial Sequence
  HTT spacer sequence GTCN PAM
ucaauaccacagacuuucug

SEQ ID NO: 25238 - RNA, 20 nt, Artificial Sequence
  HTT spacer sequence GTCN PAM
uuucugaauuuggaucuucu

SEQ ID NO: 25239 - RNA, 20 nt, Artificial Sequence
  HTT spacer sequence GTCN PAM
cagacaucuugaacuacauc

SEQ ID NO: 25240 - RNA, 20 nt, Artificial Sequence
  HTT spacer sequence GTCN PAM
gagacauacuguuccucugu

SEQ ID NO: 25241 - RNA, 20 nt, Artificial Sequence
  HTT spacer sequence GTCN PAM
ccaugaucgauguaguucaa

SEQ ID NO: 25242 - RNA, 20 nt, Artificial Sequence
  HTT spacer sequence GTCN PAM
cacagagaauggcaguggcu

SEQ ID NO: 25243 - RNA, 20 nt, Artificial Sequence
  HTT spacer sequence GTCN PAM
cgcuuccacgugggagauug

SEQ ID NO: 25244 - RNA, 20 nt, Artificial Sequence
  HTT spacer sequence GTCN PAM
ucuguuacuugcaaguuagc

SEQ ID NO: 25245 - RNA, 20 nt, Artificial Sequence
  HTT spacer sequence GTCN PAM
acuaagugaagaaaugguuc

SEQ ID NO: 25246 - RNA, 20 nt, Artificial Sequence
  HTT spacer sequence GTCN PAM
auuucaaacaaauauucuga

SEQ ID NO: 25247 - RNA, 20 nt, Artificial Sequence
  HTT spacer sequence GTCN PAM
guugaauaugcugggcacgg

SEQ ID NO: 25248 - RNA, 20 nt, Artificial Sequence
  HTT spacer sequence GTCN PAM
ccgugcccagcauauucaac

SEQ ID NO: 25249 - RNA, 20 nt, Artificial Sequence
  HTT spacer sequence GTCN PAM
gauuacaggugugagucacc

SEQ ID NO: 25250 - RNA, 20 nt, Artificial Sequence
  HTT spacer sequence GTCN PAM
ugaacuccugggcucaagca

SEQ ID NO: 25251 - RNA, 20 nt, Artificial Sequence
  HTT spacer sequence GTCN PAM
acuauguugcccauagucuu

SEQ ID NO: 25252 - RNA, 20 nt, Artificial Sequence
  HTT spacer sequence GTCN PAM
cuacagaaaauuaaaaaaaa

SEQ ID NO: 25253 - RNA, 20 nt, Artificial Sequence
  HTT spacer sequence GTCN PAM
cagcuacucgggaagcugag

SEQ ID NO: 25254 - RNA, 20 nt, Artificial Sequence
  HTT spacer sequence GTCN PAM
cacucuguugcccaggcuag

SEQ ID NO: 25255 - RNA, 20 nt, Artificial Sequence
  HTT spacer sequence GTCN PAM
caaaaauaauaguaauaaua

SEQ ID NO: 25256 - RNA, 20 nt, Artificial Sequence
  HTT spacer sequence GTCN PAM
caacuggccagucaacaaga

SEQ ID NO: 25257 - RNA, 20 nt, Artificial Sequence
  HTT spacer sequence GTCN PAM
acaagaguaaaaauuaacug

SEQ ID NO: 25258 - RNA, 20 nt, Artificial Sequence
  HTT spacer sequence GTCN PAM
aauuugugggauaacucccc

SEQ ID NO: 25259 - RNA, 20 nt, Artificial Sequence
  HTT spacer sequence GTCN PAM
ugccugacaguaauuucucu

SEQ ID NO: 25260 - RNA, 20 nt, Artificial Sequence
  HTT spacer sequence GTCN PAM
ggcaugacauuuuaaaaggg

SEQ ID NO: 25261 - RNA, 20 nt, Artificial Sequence
  HTT spacer sequence GTCN PAM
guugugucuuuuuugagcag

SEQ ID NO: 25262 - RNA, 20 nt, Artificial Sequence
  HTT spacer sequence GTCN PAM
uuuuugagcagaaggaagca

SEQ ID NO: 25263 - RNA, 20 nt, Artificial Sequence
  HTT spacer sequence GTCN PAM
uugugucagccaugcaugug

SEQ ID NO: 25264 - RNA, 20 nt, Artificial Sequence
  HTT spacer sequence GTCN PAM
gccaugcaugugauggugcc

SEQ ID NO: 25265 - RNA, 20 nt, Artificial Sequence
  HTT spacer sequence GTCN PAM
cuauguacuccacagcacga

SEQ ID NO: 25266 - RNA, 20 nt, Artificial Sequence
  HTT spacer sequence GTCN PAM
uugguguaggucccuuguuc

SEQ ID NO: 25267 - RNA, 20 nt, Artificial Sequence
  HTT spacer sequence GTCN PAM
cuuguuccuaccccuggguc

SEQ ID NO: 25268 - RNA, 20 nt, Artificial Sequence
  HTT spacer sequence GTCN PAM
gagauuuauuuagaaguggu

SEQ ID NO: 25269 - RNA, 20 nt, Artificial Sequence
  HTT spacer sequence GTCN PAM
ugguuucaacucucaaacag

SEQ ID NO: 25270 - RNA, 20 nt, Artificial Sequence
  HTT spacer sequence GTCN PAM
cuuucacauaacugguucuu

SEQ ID NO: 25271 - RNA, 20 nt, Artificial Sequence
  HTT spacer sequence GTCN PAM
cucuucaacacacaauguuc

SEQ ID NO: 25272 - RNA, 20 nt, Artificial Sequence
  HTT spacer sequence GTCN PAM
agacgcggguacugaguggg

SEQ ID NO: 25273 - RNA, 20 nt, Artificial Sequence
  HTT spacer sequence GTCN PAM
ugacgguuugagaaccguca

SEQ ID NO: 25274 - RNA, 20 nt, Artificial Sequence
  HTT spacer sequence GTCN PAM
cacucaguacccgcgucuug

SEQ ID NO: 25275 - RNA, 20 nt, Artificial Sequence
  HTT spacer sequence GTCN PAM
ucuugccuuggaccuugugu

SEQ ID NO: 25276 - RNA, 20 nt, Artificial Sequence
  HTT spacer sequence GTCN PAM
aaggcaagaggacagcaggu

SEQ ID NO: 25277 - RNA, 20 nt, Artificial Sequence
  HTT spacer sequence GTCN PAM
ugagucucugcagcagcagc

SEQ ID NO: 25278 - RNA, 20 nt, Artificial Sequence
  HTT spacer sequence GTCN PAM
cugcagcagcagcuacagug

SEQ ID NO: 25279 - RNA, 20 nt, Artificial Sequence
  HTT spacer sequence GTCN PAM
uaacucacuguagcugcugc

SEQ ID NO: 25280 - RNA, 20 nt, Artificial Sequence
  HTT spacer sequence GTCN PAM
gcacaucgaugaucagcugc

SEQ ID NO: 25281 - RNA, 20 nt, Artificial Sequence
  HTT spacer sequence GTCN PAM
ucaccagccaauaggaacug

SEQ ID NO: 25282 - RNA, 20 nt, Artificial Sequence
  HTT spacer sequence GTCN PAM
aucucugcaaggguuuccag

SEQ ID NO: 25283 - RNA, 20 nt, Artificial Sequence
  HTT spacer sequence GTCN PAM
cauccauuagauuucaugaa

SEQ ID NO: 25284 - RNA, 20 nt, Artificial Sequence
  HTT spacer sequence GTCN PAM
aucagaaauccgagugguuu

SEQ ID NO: 25285 - RNA, 20 nt, Artificial Sequence
  HTT spacer sequence GTCN PAM
ucuaccuaaaccacucggau

SEQ ID NO: 25286 - RNA, 20 nt, Artificial Sequence
  HTT spacer sequence GTCN PAM
cuaaauaaauaauaaaauaa

SEQ ID NO: 25287 - RNA, 20 nt, Artificial Sequence
  HTT spacer sequence GTCN PAM
cccaggcuugaaugcaguag

SEQ ID NO: 25288 - RNA, 20 nt, Artificial Sequence
  HTT spacer sequence GTCN PAM
uagaguucaaagcuucagug

SEQ ID NO: 25289 - RNA, 20 nt, Artificial Sequence
  HTT spacer sequence GTCN PAM
uccugccucagccucccgau

SEQ ID NO: 25290 - RNA, 20 nt, Artificial Sequence
  HTT spacer sequence GTCN PAM
cacuggcuaauauuuuuugu

SEQ ID NO: 25291 - RNA, 20 nt, Artificial Sequence
  HTT spacer sequence GTCN PAM
ugcuauguugcccaggcugg

SEQ ID NO: 25292 - RNA, 20 nt, Artificial Sequence
  HTT spacer sequence GTCN PAM
caaacuccugggcuugauug

SEQ ID NO: 25293 - RNA, 20 nt, Artificial Sequence
  HTT spacer sequence GTCN PAM
ucgucauuuaaguauucugg

SEQ ID NO: 25294 - RNA, 20 nt, Artificial Sequence
  HTT spacer sequence GTCN PAM
uuuaaguauucuggauagug

SEQ ID NO: 25295 - RNA, 20 nt, Artificial Sequence
  HTT spacer sequence GTCN PAM
uaaacuuuuaaaaaaaugua

SEQ ID NO: 25296 - RNA, 20 nt, Artificial Sequence
  HTT spacer sequence GTCN PAM
uaccuagguucaguauaaug

SEQ ID NO: 25297 - RNA, 20 nt, Artificial Sequence
  HTT spacer sequence GTCN PAM
cacucuguugccaggcugaa

SEQ ID NO: 25298 - RNA, 20 nt, Artificial Sequence
  HTT spacer sequence GTCN PAM
cuaucuguggguggagccga

SEQ ID NO: 25299 - RNA, 20 nt, Artificial Sequence
  HTT spacer sequence GTCN PAM
uuugaaauaguauuuauuuu

SEQ ID NO: 25300 - RNA, 20 nt, Artificial Sequence
  HTT spacer sequence GTCN PAM
uauugagucuggaauuguga

SEQ ID NO: 25301 - RNA, 20 nt, Artificial Sequence
  HTT spacer sequence GTCN PAM
ggaauugugagaggaaugcc

SEQ ID NO: 25302 - RNA, 20 nt, Artificial Sequence
  HTT spacer sequence GTCN PAM
uuccagggcaccuggaugag

SEQ ID NO: 25303 - RNA, 20 nt, Artificial Sequence
  HTT spacer sequence GTCN PAM
uguuuuagauguuuauuuca

SEQ ID NO: 25304 - RNA, 20 nt, Artificial Sequence
  HTT spacer sequence GTCN PAM
uauggauuuaagucuaguaa

SEQ ID NO: 25305 - RNA, 20 nt, Artificial Sequence
  HTT spacer sequence GTCN PAM
aguaauguugaguucuuucu

SEQ ID NO: 25306 - RNA, 20 nt, Artificial Sequence
  HTT spacer sequence GTCN PAM
aauacaagauuauguuuauu

SEQ ID NO: 25307 - RNA, 20 nt, Artificial Sequence
  HTT spacer sequence GTCN PAM
uccauuugcuuggagaugaa

SEQ ID NO: 25308 - RNA, 20 nt, Artificial Sequence
  HTT spacer sequence GTCN PAM
ucaucuccaagcaaauggau

SEQ ID NO: 25309 - RNA, 20 nt, Artificial Sequence
  HTT spacer sequence GTCN PAM
cacccuggggucuucaucuc

SEQ ID NO: 25310 - RNA, 20 nt, Artificial Sequence
  HTT spacer sequence GTCN PAM
aaaauuauaauuaaaaaaac

SEQ ID NO: 25311 - RNA, 20 nt, Artificial Sequence
  HTT spacer sequence GTCN PAM
auuguaaaaaguaaugcacu

SEQ ID NO: 25312 - RNA, 20 nt, Artificial Sequence
  HTT spacer sequence GTCN PAM
aaaauuuuuacaaugaaagu

SEQ ID NO: 25313 - RNA, 20 nt, Artificial Sequence
  HTT spacer sequence GTCN PAM
aaauuacaugcaauuuugua

SEQ ID NO: 25314 - RNA, 20 nt, Artificial Sequence
  HTT spacer sequence GTCN PAM
gauuacaaaauugcauguaa

SEQ ID NO: 25315 - RNA, 20 nt, Artificial Sequence
  HTT spacer sequence GTCN PAM
uuguuuugcuaugcgguugg

SEQ ID NO: 25316 - RNA, 20 nt, Artificial Sequence
  HTT spacer sequence GTCN PAM
caaaaaaaaaauaaaaaaaa

SEQ ID NO: 25317 - RNA, 20 nt, Artificial Sequence
  HTT spacer sequence GTCN PAM
ugcucuauuguccaggugcu

SEQ ID NO: 25318 - RNA, 20 nt, Artificial Sequence
  HTT spacer sequence GTCN PAM
aggugcuaucucggcucacu

SEQ ID NO: 25319 - RNA, 20 nt, Artificial Sequence
  HTT spacer sequence GTCN PAM
cccugguucaagcgauucuc

SEQ ID NO: 25320 - RNA, 20 nt, Artificial Sequence
  HTT spacer sequence GTCN PAM
cuacuaaaaauacaaaaauu

SEQ ID NO: 25321 - RNA, 20 nt, Artificial Sequence
  HTT spacer sequence GTCN PAM
cgaacuucugaccccgugau

SEQ ID NO: 25322 - RNA, 20 nt, Artificial Sequence
  HTT spacer sequence GTCN PAM
gaaguucgagaccagccugg

SEQ ID NO: 25323 - RNA, 20 nt, Artificial Sequence
  HTT spacer sequence GTCN PAM
ccccaaauguauccuugugc

SEQ ID NO: 25324 - RNA, 20 nt, Artificial Sequence
  HTT spacer sequence GTCN PAM
cuuaagauuuguguuuucgc

SEQ ID NO: 25325 - RNA, 20 nt, Artificial Sequence
  HTT spacer sequence GTCN PAM
ggaguucgagaccagccugg

SEQ ID NO: 25326 - RNA, 20 nt, Artificial Sequence
  HTT spacer sequence GTCN PAM
cgaacuccugaccucaagug

SEQ ID NO: 25327 - RNA, 20 nt, Artificial Sequence
  HTT spacer sequence GTCN PAM
cuacuaaaaauacaaaaauu

SEQ ID NO: 25328 - RNA, 20 nt, Artificial Sequence
  HTT spacer sequence GTCN PAM
gaugugguggcacacgccug

SEQ ID NO: 25329 - RNA, 20 nt, Artificial Sequence
  HTT spacer sequence GTCN PAM
cucucuguugcccagguugg

SEQ ID NO: 25330 - RNA, 20 nt, Artificial Sequence
  HTT spacer sequence GTCN PAM
caaaacaaacaaagauuugu

SEQ ID NO: 25331 - RNA, 20 nt, Artificial Sequence
  HTT spacer sequence GTCN PAM
agaaaauacaaaucuuuguu

SEQ ID NO: 25332 - RNA, 20 nt, Artificial Sequence
  HTT spacer sequence GTCN PAM
uaguauagauggacuuuugc

SEQ ID NO: 25333 - RNA, 20 nt, Artificial Sequence
  HTT spacer sequence GTCN PAM
aucuauacuaugaccccagu

SEQ ID NO: 25334 - RNA, 20 nt, Artificial Sequence
  HTT spacer sequence GTCN PAM
acacaaaaucuugcaggcaa

SEQ ID NO: 25335 - RNA, 20 nt, Artificial Sequence
  HTT spacer sequence GTCN PAM
ucauuucucuugaguagauc

SEQ ID NO: 25336 - RNA, 20 nt, Artificial Sequence
  HTT spacer sequence GTCN PAM
gagauuuuaguacaccuguc

SEQ ID NO: 25337 - RNA, 20 nt, Artificial Sequence
  HTT spacer sequence GTCN PAM
cccgaguaguguaccuugua

SEQ ID NO: 25338 - RNA, 20 nt, Artificial Sequence
  HTT spacer sequence GTCN PAM
cucaccuuccagccuuccgc

SEQ ID NO: 25339 - RNA, 20 nt, Artificial Sequence
  HTT spacer sequence GTCN PAM
ccaauguccauuauaccaca

SEQ ID NO: 25340 - RNA, 20 nt, Artificial Sequence
  HTT spacer sequence GTCN PAM
auuauaccacacuguaugcc

SEQ ID NO: 25341 - RNA, 20 nt, Artificial Sequence
  HTT spacer sequence GTCN PAM
cauucuaugaugcccaggcu

SEQ ID NO: 25342 - RNA, 20 nt, Artificial Sequence
  HTT spacer sequence GTCN PAM
cugccucccagguucaagug

SEQ ID NO: 25343 - RNA, 20 nt, Artificial Sequence
  HTT spacer sequence GTCN PAM
gccucccaggaagcuggaau

SEQ ID NO: 25344 - RNA, 20 nt, Artificial Sequence
  HTT spacer sequence GTCN PAM
ggccaacauggugaaacccc

SEQ ID NO: 25345 - RNA, 20 nt, Artificial Sequence
  HTT spacer sequence GTCN PAM
caagcuccugaccucaagug

SEQ ID NO: 25346 - RNA, 20 nt, Artificial Sequence
  HTT spacer sequence GTCN PAM
ggagcuugagaccagucugg

SEQ ID NO: 25347 - RNA, 20 nt, Artificial Sequence
  HTT spacer sequence GTCN PAM
cacaaguaaucaaagaaaug

SEQ ID NO: 25348 - RNA, 20 nt, Artificial Sequence
  HTT spacer sequence GTCN PAM
uauaaaccuauuaaguaaau

SEQ ID NO: 25349 - RNA, 20 nt, Artificial Sequence
  HTT spacer sequence GTCN PAM
ccacaaacaaacaaacaaaa

SEQ ID NO: 25350 - RNA, 20 nt, Artificial Sequence
  HTT spacer sequence GTCN PAM
cgcucugucacucaggcagg

SEQ ID NO: 25351 - RNA, 20 nt, Artificial Sequence
  HTT spacer sequence GTCN PAM
cucaggcaggaaugcagugg

SEQ ID NO: 25352 - RNA, 20 nt, Artificial Sequence
  HTT spacer sequence GTCN PAM
cccugucucggccucccaaa

SEQ ID NO: 25353 - RNA, 20 nt, Artificial Sequence
  HTT spacer sequence GTCN PAM
cggccucccaaagugcuggg

SEQ ID NO: 25354 - RNA, 20 nt, Artificial Sequence
  HTT spacer sequence GTCN PAM
ccaugaggaaagagacuuua

SEQ ID NO: 25355 - RNA, 20 nt, Artificial Sequence
  HTT spacer sequence GTCN PAM
cuuuccucauggagacuuga

SEQ ID NO: 25356 - RNA, 20 nt, Artificial Sequence
  HTT spacer sequence GTCN PAM
gcaagccccaugaucuucaa

SEQ ID NO: 25357 - RNA, 20 nt, Artificial Sequence
  HTT spacer sequence GTCN PAM
caaacacucccagauggcaa

SEQ ID NO: 25358 - RNA, 20 nt, Artificial Sequence
  HTT spacer sequence GTCN PAM
gcaaaacugucccaaacacu

SEQ ID NO: 25359 - RNA, 20 nt, Artificial Sequence
  HTT spacer sequence GTCN PAM
gaaugccagcugcauuccuu

SEQ ID NO: 25360 - RNA, 20 nt, Artificial Sequence
  HTT spacer sequence GTCN PAM
acagaguacugagcacagag

SEQ ID NO: 25361 - RNA, 20 nt, Artificial Sequence
  HTT spacer sequence GTCN PAM
guccacagaguacugagcac

SEQ ID NO: 25362 - RNA, 20 nt, Artificial Sequence
  HTT spacer sequence GTCN PAM
uaaaauuuaaucccuuucua

SEQ ID NO: 25363 - RNA, 20 nt, Artificial Sequence
  HTT spacer sequence GTCN PAM
gucauaaaauuuaaucccuu

SEQ ID NO: 25364 - RNA, 20 nt, Artificial Sequence
  HTT spacer sequence GTCN PAM
ggaguucaagaguucaagaa

SEQ ID NO: 25365 - RNA, 20 nt, Artificial Sequence
  HTT spacer sequence GTCN PAM
cuacuaaaacuacaaaaauu

SEQ ID NO: 25366 - RNA, 20 nt, Artificial Sequence
  HTT spacer sequence GTCN PAM
agguucaagugauucuccug

SEQ ID NO: 25367 - RNA, 20 nt, Artificial Sequence
  HTT spacer sequence GTCN PAM
cucuguggcccaggccggag

SEQ ID NO: 25368 - RNA, 20 nt, Artificial Sequence
  HTT spacer sequence GTCN PAM
caaaaaaaaaaaaaaaagaa

SEQ ID NO: 25369 - RNA, 20 nt, Artificial Sequence
  HTT spacer sequence GTCN PAM
gagugggugcaugagaguga

SEQ ID NO: 25370 - RNA, 20 nt, Artificial Sequence
  HTT spacer sequence GTCN PAM
cucucaugcacccacucgga

SEQ ID NO: 25371 - RNA, 20 nt, Artificial Sequence
  HTT spacer sequence GTCN PAM
ccaaucucagggucacucuc

SEQ ID NO: 25372 - RNA, 20 nt, Artificial Sequence
  HTT spacer sequence GTCN PAM
cgugcuugaagaacgccacc

SEQ ID NO: 25373 - RNA, 20 nt, Artificial Sequence
  HTT spacer sequence GTCN PAM
gcugguaaccagagguguug

SEQ ID NO: 25374 - RNA, 20 nt, Artificial Sequence
  HTT spacer sequence GTCN PAM
aucacaggugaguuucaucu

SEQ ID NO: 25375 - RNA, 20 nt, Artificial Sequence
  HTT spacer sequence GTCN PAM
caaagcuguuuuauaaaugu

SEQ ID NO: 25376 - RNA, 20 nt, Artificial Sequence
  HTT spacer sequence GTCN PAM
cauuuauaaaacagcuuugg

SEQ ID NO: 25377 - RNA, 20 nt, Artificial Sequence
  HTT spacer sequence GTCN PAM
uuggucacauuuauaaaaca

SEQ ID NO: 25378 - RNA, 20 nt, Artificial Sequence
  HTT spacer sequence GTCN PAM
caugcaugagaaguuucagg

SEQ ID NO: 25379 - RNA, 20 nt, Artificial Sequence
  HTT spacer sequence GTCN PAM
gcacaauaaccagguaugcu

SEQ ID NO: 25380 - RNA, 20 nt, Artificial Sequence
  HTT spacer sequence GTCN PAM
gcauaccugguuauugugcu

SEQ ID NO: 25381 - RNA, 20 nt, Artificial Sequence
  HTT spacer sequence GTCN PAM
ggaaaaugcccuuuccugau

SEQ ID NO: 25382 - RNA, 20 nt, Artificial Sequence
  HTT spacer sequence GTCN PAM
guccuuugauaggauauuau

SEQ ID NO: 25383 - RNA, 20 nt, Artificial Sequence
  HTT spacer sequence GTCN PAM
uuugauaggauauuaucauu

SEQ ID NO: 25384 - RNA, 20 nt, Artificial Sequence
  HTT spacer sequence GTCN PAM
auccucaaaaugauaauauc

SEQ ID NO: 25385 - RNA, 20 nt, Artificial Sequence
  HTT spacer sequence GTCN PAM
cagcugagugauuguggcag

SEQ ID NO: 25386 - RNA, 20 nt, Artificial Sequence
  HTT spacer sequence GTCN PAM
gcacauggaauguaauaaac

SEQ ID NO: 25387 - RNA, 20 nt, Artificial Sequence
  HTT spacer sequence GTCN PAM
caaacaaaaauacaacuguc

SEQ ID NO: 25388 - RNA, 20 nt, Artificial Sequence
  HTT spacer sequence GTCN PAM
guguuauuuaggguuaucca

SEQ ID NO: 25389 - RNA, 20 nt, Artificial Sequence
  HTT spacer sequence GTCN PAM
aauggccacauauaucccau

SEQ ID NO: 25390 - RNA, 20 nt, Artificial Sequence
  HTT spacer sequence GTCN PAM
cacucaccuaagaagcagau

SEQ ID NO: 25391 - RNA, 20 nt, Artificial Sequence
  HTT spacer sequence GTCN PAM
uaucacuucugcaaucuucu

SEQ ID NO: 25392 - RNA, 20 nt, Artificial Sequence
  HTT spacer sequence GTCN PAM
uuuaaauguuauuuuaaaaa

SEQ ID NO: 25393 - RNA, 20 nt, Artificial Sequence
  HTT spacer sequence GTCN PAM
aaguuuuguaaaacacuguu

SEQ ID NO: 25394 - RNA, 20 nt, Artificial Sequence
  HTT spacer sequence GTCN PAM
uuuaguccaaguuuuguaaa

SEQ ID NO: 25395 - RNA, 20 nt, Artificial Sequence
  HTT spacer sequence GTCN PAM
uaauuccugaauaaauaacg

SEQ ID NO: 25396 - RNA, 20 nt, Artificial Sequence
  HTT spacer sequence GTCN PAM
uuuuucauguaaagacugcu

SEQ ID NO: 25397 - RNA, 20 nt, Artificial Sequence
  HTT spacer sequence GTCN PAM
uuacaugaaaaaagacguua

SEQ ID NO: 25398 - RNA, 20 nt, Artificial Sequence
  HTT spacer sequence GTCN PAM
cuugagcucagggguucaag

SEQ ID NO: 25399 - RNA, 20 nt, Artificial Sequence
  HTT spacer sequence GTCN PAM
ugaaccccugagcucaagcg

SEQ ID NO: 25400 - RNA, 20 nt, Artificial Sequence
  HTT spacer sequence GTCN PAM
cacucuguagcccaagcugg

SEQ ID NO: 25401 - RNA, 20 nt, Artificial Sequence
  HTT spacer sequence GTCN PAM
caaaaaaagacacacacaca

SEQ ID NO: 25402 - RNA, 20 nt, Artificial Sequence
  HTT spacer sequence GTCN PAM
uuuuuugagacagagucuca

SEQ ID NO: 25403 - RNA, 20 nt, Artificial Sequence
  HTT spacer sequence GTCN PAM
ccauguuuuuuuuguuugug

SEQ ID NO: 25404 - RNA, 20 nt, Artificial Sequence
  HTT spacer sequence GTCN PAM
ugaaucuucuccaagagaga

SEQ ID NO: 25405 - RNA, 20 nt, Artificial Sequence
  HTT spacer sequence GTCN PAM
uuucagaagaugaauauuua

SEQ ID NO: 25406 - RNA, 20 nt, Artificial Sequence
  HTT spacer sequence GTCN PAM
cccaguuccaaacuucagca

SEQ ID NO: 25407 - RNA, 20 nt, Artificial Sequence
  HTT spacer sequence GTCN PAM
agaggccugcugaaguuugg

SEQ ID NO: 25408 - RNA, 20 nt, Artificial Sequence
  HTT spacer sequence GTCN PAM
auugggucuugcgugauaga

SEQ ID NO: 25409 - RNA, 20 nt, Artificial Sequence
  HTT spacer sequence GTCN PAM
ugcgugauagauacaaugac

SEQ ID NO: 25410 - RNA, 20 nt, Artificial Sequence
  HTT spacer sequence GTCN PAM
uuguaucuaucacgcaagac

SEQ ID NO: 25411 - RNA, 20 nt, Artificial Sequence
  HTT spacer sequence GTCN PAM
ccguggacaagacacuguga

SEQ ID NO: 25412 - RNA, 20 nt, Artificial Sequence
  HTT spacer sequence GTCN PAM
acggagacacucaacaaaac

SEQ ID NO: 25413 - RNA, 20 nt, Artificial Sequence
  HTT spacer sequence GTCN PAM
uguccacggagacacucaac

SEQ ID NO: 25414 - RNA, 20 nt, Artificial Sequence
  HTT spacer sequence GTCN PAM
auuucuaucccccauuauag

SEQ ID NO: 25415 - RNA, 20 nt, Artificial Sequence
  HTT spacer sequence GTCN PAM
gccccgaacacuuuugcugc

SEQ ID NO: 25416 - RNA, 20 nt, Artificial Sequence
  HTT spacer sequence GTCN PAM
caacuuuuaagugaaacggg

SEQ ID NO: 25417 - RNA, 20 nt, Artificial Sequence
  HTT spacer sequence GTCN PAM
cuauauuuuuguuauuagaa

SEQ ID NO: 25418 - RNA, 20 nt, Artificial Sequence
  HTT spacer sequence GTCN PAM
guuaugcuugguaguagguu

SEQ ID NO: 25419 - RNA, 20 nt, Artificial Sequence
  HTT spacer sequence GTCN PAM
cuauggaaaauaaccuuuca

SEQ ID NO: 25420 - RNA, 20 nt, Artificial Sequence
  HTT spacer sequence GTCN PAM
cuuucuugaucggucuuacu

SEQ ID NO: 25421 - RNA, 20 nt, Artificial Sequence
  HTT spacer sequence GTCN PAM
uacugacauuguaauaguuu

SEQ ID NO: 25422 - RNA, 20 nt, Artificial Sequence
  HTT spacer sequence GTCN PAM
guaagaccgaucaagaaaga

SEQ ID NO: 25423 - RNA, 20 nt, Artificial Sequence
  HTT spacer sequence GTCN PAM
ucuuacggugaggugcuugu

SEQ ID NO: 25424 - RNA, 20 nt, Artificial Sequence
  HTT spacer sequence GTCN PAM
uacagcucuuacuuauccau

SEQ ID NO: 25425 - RNA, 20 nt, Artificial Sequence
  HTT spacer sequence GTCN PAM
uuuacauuccuggaguaagc

SEQ ID NO: 25426 - RNA, 20 nt, Artificial Sequence
  HTT spacer sequence GTCN PAM
uccuaaauuggcugaauuuu

SEQ ID NO: 25427 - RNA, 20 nt, Artificial Sequence
  HTT spacer sequence GTCN PAM
ggagucggauaccagccugg

SEQ ID NO: 25428 - RNA, 20 nt, Artificial Sequence
  HTT spacer sequence GTCN PAM
gauaccagccuggccaacgu

SEQ ID NO: 25429 - RNA, 20 nt, Artificial Sequence
  HTT spacer sequence GTCN PAM
agccacugcacuccagccug

SEQ ID NO: 25430 - RNA, 20 nt, Artificial Sequence
  HTT spacer sequence GTCN PAM
cgcucuauugcacaggcugg

SEQ ID NO: 25431 - RNA, 20 nt, Artificial Sequence
  HTT spacer sequence GTCN PAM
caaaaaaaaaaaaaaaaaaa

SEQ ID NO: 25432 - RNA, 20 nt, Artificial Sequence
  HTT spacer sequence GTCN PAM
ccugcauugguaauguauca

SEQ ID NO: 25433 - RNA, 20 nt, Artificial Sequence
  HTT spacer sequence GTCN PAM
agauuauaauuaacucagug

SEQ ID NO: 25434 - RNA, 20 nt, Artificial Sequence
  HTT spacer sequence GTCN PAM
cugaguuaauuauaaucuag

SEQ ID NO: 25435 - RNA, 20 nt, Artificial Sequence
  HTT spacer sequence GTCN PAM
caaaaaaaaaauaauaaaau

SEQ ID NO: 25436 - RNA, 20 nt, Artificial Sequence
  HTT spacer sequence GTCN PAM
cuacuaaaaauacaaaauua

SEQ ID NO: 25437 - RNA, 20 nt, Artificial Sequence
  HTT spacer sequence GTCN PAM
ggcuggucucaaacucccaa

SEQ ID NO: 25438 - RNA, 20 nt, Artificial Sequence
  HTT spacer sequence GTCN PAM
caaacucccaaccucaggug

SEQ ID NO: 25439 - RNA, 20 nt, Artificial Sequence
  HTT spacer sequence GTCN PAM
aggagggcggaucaccugag

SEQ ID NO: 25440 - RNA, 20 nt, Artificial Sequence
  HTT spacer sequence GTCN PAM
gcaacauaaauucuuauuau

SEQ ID NO: 25441 - RNA, 20 nt, Artificial Sequence
  HTT spacer sequence GTCN PAM
gauuucaguuaagaaaaaua

SEQ ID NO: 25442 - RNA, 20 nt, Artificial Sequence
  HTT spacer sequence GTCN PAM
ccagcaaauuaacauuacuu

SEQ ID NO: 25443 - RNA, 20 nt, Artificial Sequence
  HTT spacer sequence GTCN PAM
ggcuggucucgaacuccuga

SEQ ID NO: 25444 - RNA, 20 nt, Artificial Sequence
  HTT spacer sequence GTCN PAM
cgaacuccugaccucgugau

SEQ ID NO: 25445 - RNA, 20 nt, Artificial Sequence
  HTT spacer sequence GTCN PAM
ggaguucgagaccagccuga

SEQ ID NO: 25446 - RNA, 20 nt, Artificial Sequence
  HTT spacer sequence GTCN PAM
ggcugggcgcaguagcucac

SEQ ID NO: 25447 - RNA, 20 nt, Artificial Sequence
  HTT spacer sequence GTCN PAM
aauaaaauaaaaaggucugg

SEQ ID NO: 25448 - RNA, 20 nt, Artificial Sequence
  HTT spacer sequence GTCN PAM
ucuauaacauggaaguauuu

SEQ ID NO: 25449 - RNA, 20 nt, Artificial Sequence
  HTT spacer sequence GTCN PAM
gcaguauggucuucccuuga

SEQ ID NO: 25450 - RNA, 20 nt, Artificial Sequence
  HTT spacer sequence GTCN PAM
ucccuugauuuguucaaaau

SEQ ID NO: 25451 - RNA, 20 nt, Artificial Sequence
  HTT spacer sequence GTCN PAM
gccacaauaaaaauaaauaa

SEQ ID NO: 25452 - RNA, 20 nt, Artificial Sequence
  HTT spacer sequence GTCN PAM
ggcacuguuguaggcuuggg

SEQ ID NO: 25453 - RNA, 20 nt, Artificial Sequence
  HTT spacer sequence GTCN PAM
gggagacgaugugguaagcu

SEQ ID NO: 25454 - RNA, 20 nt, Artificial Sequence
  HTT spacer sequence GTCN PAM
cccugaccagccugcagaaa

SEQ ID NO: 25455 - RNA, 20 nt, Artificial Sequence
  HTT spacer sequence GTCN PAM
aaaguaggaaguuguaccau

SEQ ID NO: 25456 - RNA, 20 nt, Artificial Sequence
  HTT spacer sequence GTCN PAM
caccaugguacaacuuccua

SEQ ID NO: 25457 - RNA, 20 nt, Artificial Sequence
  HTT spacer sequence GTCN PAM
ucuuuccacugccuucccag

SEQ ID NO: 25458 - RNA, 20 nt, Artificial Sequence
  HTT spacer sequence GTCN PAM
acaacaguaugacauaaaca

SEQ ID NO: 25459 - RNA, 20 nt, Artificial Sequence
  HTT spacer sequence GTCN PAM
uacuguuguagacaacuauu

SEQ ID NO: 25460 - RNA, 20 nt, Artificial Sequence
  HTT spacer sequence GTCN PAM
uuuaucaauuuggcuuuuug

SEQ ID NO: 25461 - RNA, 20 nt, Artificial Sequence
  HTT spacer sequence GTCN PAM
cacacagcuaauauagcaga

SEQ ID NO: 25462 - RNA, 20 nt, Artificial Sequence
  HTT spacer sequence GTCN PAM
cuagucucacacagcuaaua

SEQ ID NO: 25463 - RNA, 20 nt, Artificial Sequence
  HTT spacer sequence GTCN PAM
ucaaguucauuuaagggaau

SEQ ID NO: 25464 - RNA, 20 nt, Artificial Sequence
  HTT spacer sequence GTCN PAM
agcuaaugagaaaagccuuu

SEQ ID NO: 25465 - RNA, 20 nt, Artificial Sequence
  HTT spacer sequence GTCN PAM
caauuaagugaaaaaagguu

SEQ ID NO: 25466 - RNA, 20 nt, Artificial Sequence
  HTT spacer sequence GTCN PAM
ucuccagcauucaggaauag

SEQ ID NO: 25467 - RNA, 20 nt, Artificial Sequence
  HTT spacer sequence GTCN PAM
ccaaaaucauucucaguaau

SEQ ID NO: 25468 - RNA, 20 nt, Artificial Sequence
  HTT spacer sequence GTCN PAM
gcaaaugaccaacugauauu

SEQ ID NO: 25469 - RNA, 20 nt, Artificial Sequence
  HTT spacer sequence GTCN PAM
uuugcugacacacacaagaa

SEQ ID NO: 25470 - RNA, 20 nt, Artificial Sequence
  HTT spacer sequence GTCN PAM
guaugugaggaaggugggaa

SEQ ID NO: 25471 - RNA, 20 nt, Artificial Sequence
  HTT spacer sequence GTCN PAM
ggcacuagacuucacuucug

SEQ ID NO: 25472 - RNA, 20 nt, Artificial Sequence
  HTT spacer sequence GTCN PAM
agugccagaccuaugauuag

SEQ ID NO: 25473 - RNA, 20 nt, Artificial Sequence
  HTT spacer sequence GTCN PAM
acccauauuuucuuuuuuau

SEQ ID NO: 25474 - RNA, 20 nt, Artificial Sequence
  HTT spacer sequence GTCN PAM
gcaccucaggugguuggagu

SEQ ID NO: 25475 - RNA, 20 nt, Artificial Sequence
  HTT spacer sequence GTCN PAM
aacuaccaagcauugaacuc

SEQ ID NO: 25476 - RNA, 20 nt, Artificial Sequence
  HTT spacer sequence GTCN PAM
uuucuaggggauugagcccu

SEQ ID NO: 25477 - RNA, 20 nt, Artificial Sequence
  HTT spacer sequence GTCN PAM
ugcuuauuugagguugcaau

SEQ ID NO: 25478 - RNA, 20 nt, Artificial Sequence
  HTT spacer sequence GTCN PAM
uucaauaacuuuuacuacaa

SEQ ID NO: 25479 - RNA, 20 nt, Artificial Sequence
  HTT spacer sequence GTCN PAM
gaccugccccauuguguauc

SEQ ID NO: 25480 - RNA, 20 nt, Artificial Sequence
  HTT spacer sequence GTCN PAM
gacgugguuaguuuuccuga

SEQ ID NO: 25481 - RNA, 20 nt, Artificial Sequence
  HTT spacer sequence GTCN PAM
ggguagcugucucaucucca

SEQ ID NO: 25482 - RNA, 20 nt, Artificial Sequence
  HTT spacer sequence GTCN PAM
caucuccaguucagcagaac

SEQ ID NO: 25483 - RNA, 20 nt, Artificial Sequence
  HTT spacer sequence GTCN PAM
uaugcccuaguaaaagcauu

SEQ ID NO: 25484 - RNA, 20 nt, Artificial Sequence
  HTT spacer sequence GTCN PAM
aaugaaggaaugcuuuuacu

SEQ ID NO: 25485 - RNA, 20 nt, Artificial Sequence
  HTT spacer sequence GTCN PAM
caauacauuuuauaccagcu

SEQ ID NO: 25486 - RNA, 20 nt, Artificial Sequence
  HTT spacer sequence GTCN PAM
uccuuucucuugcaauucca

SEQ ID NO: 25487 - RNA, 20 nt, Artificial Sequence
  HTT spacer sequence GTCN PAM
auaauuugacuuugcaaaug

SEQ ID NO: 25488 - RNA, 20 nt, Artificial Sequence
  HTT spacer sequence GTCN PAM
aauuauagacaauuuuuaag

SEQ ID NO: 25489 - RNA, 20 nt, Artificial Sequence
  HTT spacer sequence GTCN PAM
gcuuccagagugccuccacu

SEQ ID NO: 25490 - RNA, 20 nt, Artificial Sequence
  HTT spacer sequence GTCN PAM
aggaagagcuguaccguugg

SEQ ID NO: 25491 - RNA, 20 nt, Artificial Sequence
  HTT spacer sequence GTCN PAM
gaaucauuguggccauccca

SEQ ID NO: 25492 - RNA, 20 nt, Artificial Sequence
  HTT spacer sequence GTCN PAM
gcuugguucccauuggaucu

SEQ ID NO: 25493 - RNA, 20 nt, Artificial Sequence
  HTT spacer sequence GTCN PAM
cuguuucaacucaguaccag

SEQ ID NO: 25494 - RNA, 20 nt, Artificial Sequence
  HTT spacer sequence GTCN PAM
uggagucccuguuucaacuc

SEQ ID NO: 25495 - RNA, 20 nt, Artificial Sequence
  HTT spacer sequence GTCN PAM
uugccagugauggcuugucc

SEQ ID NO: 25496 - RNA, 20 nt, Artificial Sequence
  HTT spacer sequence GTCN PAM
cuuuagucaaauuucagaug

SEQ ID NO: 25497 - RNA, 20 nt, Artificial Sequence
  HTT spacer sequence GTCN PAM
aauuucagauguuaccuaua

SEQ ID NO: 25498 - RNA, 20 nt, Artificial Sequence
  HTT spacer sequence GTCN PAM
auacauuauacuuucuuaac

SEQ ID NO: 25499 - RNA, 20 nt, Artificial Sequence
  HTT spacer sequence GTCN PAM
cacagaguggcccuaaucac

SEQ ID NO: 25500 - RNA, 20 nt, Artificial Sequence
  HTT spacer sequence GTCN PAM
uccuugcuggccacauccuc

SEQ ID NO: 25501 - RNA, 20 nt, Artificial Sequence
  HTT spacer sequence GTCN PAM
auugaaauugauuuugggag

SEQ ID NO: 25502 - RNA, 20 nt, Artificial Sequence
  HTT spacer sequence GTCN PAM
cuuucacgaaacucuccuau

SEQ ID NO: 25503 - RNA, 20 nt, Artificial Sequence
  HTT spacer sequence GTCN PAM
cccuaccuucuccuccagcc

SEQ ID NO: 25504 - RNA, 20 nt, Artificial Sequence
  HTT spacer sequence GTCN PAM
caaagccauuaucuugccuu

SEQ ID NO: 25505 - RNA, 20 nt, Artificial Sequence
  HTT spacer sequence GTCN PAM
ucccuacagucccaaagcca

SEQ ID NO: 25506 - RNA, 20 nt, Artificial Sequence
  HTT spacer sequence GTCN PAM
ucacaaccgaaguucaguug

SEQ ID NO: 25507 - RNA, 20 nt, Artificial Sequence
  HTT spacer sequence GTCN PAM
ucccagguuucuuugucuuc

SEQ ID NO: 25508 - RNA, 20 nt, Artificial Sequence
  HTT spacer sequence GTCN PAM
ccaccacacaccugcccagg

SEQ ID NO: 25509 - RNA, 20 nt, Artificial Sequence
  HTT spacer sequence GTCN PAM
uggaaauugggaacacagau

SEQ ID NO: 25510 - RNA, 20 nt, Artificial Sequence
  HTT spacer sequence GTCN PAM
ggccaacucucaacauaggg

SEQ ID NO: 25511 - RNA, 20 nt, Artificial Sequence
  HTT spacer sequence GTCN PAM
uaaaugacuucaguucccca

SEQ ID NO: 25512 - RNA, 20 nt, Artificial Sequence
  HTT spacer sequence GTCN PAM
uuuaagacccuauguugaga

SEQ ID NO: 25513 - RNA, 20 nt, Artificial Sequence
  HTT spacer sequence GTCN PAM
uucccaugcuauuggggugg

SEQ ID NO: 25514 - RNA, 20 nt, Artificial Sequence
  HTT spacer sequence GTCN PAM
gugcccauaucacagccagu

SEQ ID NO: 25515 - RNA, 20 nt, Artificial Sequence
  HTT spacer sequence GTCN PAM
ggccagcccugggggaccgg

SEQ ID NO: 25516 - RNA, 20 nt, Artificial Sequence
  HTT spacer sequence GTCN PAM
cccagggcuggccagaccuc

SEQ ID NO: 25517 - RNA, 20 nt, Artificial Sequence
  HTT spacer sequence GTCN PAM
uggaugacguggcuccugga

SEQ ID NO: 25518 - RNA, 20 nt, Artificial Sequence
  HTT spacer sequence GTCN PAM
uccaggacgugggcacaaau

SEQ ID NO: 25519 - RNA, 20 nt, Artificial Sequence
  HTT spacer sequence GTCN PAM
aggagccacgucauccagga

SEQ ID NO: 25520 - RNA, 20 nt, Artificial Sequence
  HTT spacer sequence GTCN PAM
cacuugggugcuggauucau

SEQ ID NO: 25521 - RNA, 20 nt, Artificial Sequence
  HTT spacer sequence GTCN PAM
uuaaggcuguaugaauccag

SEQ ID NO: 25522 - RNA, 20 nt, Artificial Sequence
  HTT spacer sequence GTCN PAM
ggaaacccauagucauuaag

SEQ ID NO: 25523 - RNA, 20 nt, Artificial Sequence
  HTT spacer sequence GTCN PAM
cuucuuuauucucuuuuugc

SEQ ID NO: 25524 - RNA, 20 nt, Artificial Sequence
  HTT spacer sequence GTCN PAM
caaucugagcaauuuuguuc

SEQ ID NO: 25525 - RNA, 20 nt, Artificial Sequence
  HTT spacer sequence GTCN PAM
cauuuugauguuaaauuuag

SEQ ID NO: 25526 - RNA, 20 nt, Artificial Sequence
  HTT spacer sequence GTCN PAM
cccaaagugcuggaauaaca

SEQ ID NO: 25527 - RNA, 20 nt, Artificial Sequence
  HTT spacer sequence GTCN PAM
cgaacucuuggccucaagug

SEQ ID NO: 25528 - RNA, 20 nt, Artificial Sequence
  HTT spacer sequence GTCN PAM
agagaucaagaccauccugg

SEQ ID NO: 25529 - RNA, 20 nt, Artificial Sequence
  HTT spacer sequence GTCN PAM
ugaucucuugaccucgugau

SEQ ID NO: 25530 - RNA, 20 nt, Artificial Sequence
  HTT spacer sequence GTCN PAM
cuacuaaaaauacaaaaaaa

SEQ ID NO: 25531 - RNA, 20 nt, Artificial Sequence
  HTT spacer sequence GTCN PAM
cagcugcucgggaggcugag

SEQ ID NO: 25532 - RNA, 20 nt, Artificial Sequence
  HTT spacer sequence GTCN PAM
cccaggcuggagugcagugg

SEQ ID NO: 25533 - RNA, 20 nt, Artificial Sequence
  HTT spacer sequence GTCN PAM
cgcucugucacccaggcugg

SEQ ID NO: 25534 - RNA, 20 nt, Artificial Sequence
  HTT spacer sequence GTCN PAM
caaaaaaaaaauuagauggg

SEQ ID NO: 25535 - RNA, 20 nt, Artificial Sequence
  HTT spacer sequence GTCN PAM
cccaggcuggagugcagcgg

SEQ ID NO: 25536 - RNA, 20 nt, Artificial Sequence
  HTT spacer sequence GTCN PAM
gacucuuuccaaaagaagaa

SEQ ID NO: 25537 - RNA, 20 nt, Artificial Sequence
  HTT spacer sequence GTCN PAM
gacucugucacccaggcugg

SEQ ID NO: 25538 - RNA, 20 nt, Artificial Sequence
  HTT spacer sequence GTCN PAM
cauuuuuuucuucuuuugga

SEQ ID NO: 25539 - RNA, 20 nt, Artificial Sequence
  HTT spacer sequence GTCN PAM
cuguuaucccuaagagggaa

SEQ ID NO: 25540 - RNA, 20 nt, Artificial Sequence
  HTT spacer sequence GTCN PAM
ccuuaaaucuugguuaaugg

SEQ ID NO: 25541 - RNA, 20 nt, Artificial Sequence
  HTT spacer sequence GTCN PAM
uggcuagcauaguuauggag

SEQ ID NO: 25542 - RNA, 20 nt, Artificial Sequence
  HTT spacer sequence GTCN PAM
cugagauuggcagaacauuc

SEQ ID NO: 25543 - RNA, 20 nt, Artificial Sequence
  HTT spacer sequence GTCN PAM
aucuuaaauccauuguacaa

SEQ ID NO: 25544 - RNA, 20 nt, Artificial Sequence
  HTT spacer sequence GTCN PAM
cuacuaaaacuacaaaaaaa

SEQ ID NO: 25545 - RNA, 20 nt, Artificial Sequence
  HTT spacer sequence GTCN PAM
gguuggucucaaacuccuga

SEQ ID NO: 25546 - RNA, 20 nt, Artificial Sequence
  HTT spacer sequence GTCN PAM
caaacuccugaccugaagug

SEQ ID NO: 25547 - RNA, 20 nt, Artificial Sequence
  HTT spacer sequence GTCN PAM
ggaguuugagaccaaccuga

SEQ ID NO: 25548 - RNA, 20 nt, Artificial Sequence
  HTT spacer sequence GTCN PAM
aucuuaggcugggcguggug

SEQ ID NO: 25549 - RNA, 20 nt, Artificial Sequence
  HTT spacer sequence GTCN PAM
ucuaccuuuaaaaaucuccc

SEQ ID NO: 25550 - RNA, 20 nt, Artificial Sequence
  HTT spacer sequence GTCN PAM
ucucccuucucugcaaacau

SEQ ID NO: 25551 - RNA, 20 nt, Artificial Sequence
  HTT spacer sequence GTCN PAM
cagccucagcccacagagcu

SEQ ID NO: 25552 - RNA, 20 nt, Artificial Sequence
  HTT spacer sequence GTCN PAM
accucagagcagugggaagc

SEQ ID NO: 25553 - RNA, 20 nt, Artificial Sequence
  HTT spacer sequence GTCN PAM
aggccaagagagccaaagaa

SEQ ID NO: 25554 - RNA, 20 nt, Artificial Sequence
  HTT spacer sequence GTCN PAM
acuacuucagccauccuucc

SEQ ID NO: 25555 - RNA, 20 nt, Artificial Sequence
  HTT spacer sequence GTCN PAM
uuacaucucugggcacugcu

SEQ ID NO: 25556 - RNA, 20 nt, Artificial Sequence
  HTT spacer sequence GTCN PAM
ugccugccuuucccucuuug

SEQ ID NO: 25557 - RNA, 20 nt, Artificial Sequence
  HTT spacer sequence GTCN PAM
ucuucaguuggcuuucagag

SEQ ID NO: 25558 - RNA, 20 nt, Artificial Sequence
  HTT spacer sequence GTCN PAM
cuggguucaguccuuccugc

SEQ ID NO: 25559 - RNA, 20 nt, Artificial Sequence
  HTT spacer sequence GTCN PAM
uuccugcccaccagcacaug

SEQ ID NO: 25560 - RNA, 20 nt, Artificial Sequence
  HTT spacer sequence GTCN PAM
uaggccgucuucucucuuug

SEQ ID NO: 25561 - RNA, 20 nt, Artificial Sequence
  HTT spacer sequence GTCN PAM
ucucucuuuguagucucugg

SEQ ID NO: 25562 - RNA, 20 nt, Artificial Sequence
  HTT spacer sequence GTCN PAM
cugggccagugcuguucuag

SEQ ID NO: 25563 - RNA, 20 nt, Artificial Sequence
  HTT spacer sequence GTCN PAM
ugccuggcauagcuauggag

SEQ ID NO: 25564 - RNA, 20 nt, Artificial Sequence
  HTT spacer sequence GTCN PAM
cacuagcugcauuucaaggg

SEQ ID NO: 25565 - RNA, 20 nt, Artificial Sequence
  HTT spacer sequence GTCN PAM
gggcuguucuccugucuuca

SEQ ID NO: 25566 - RNA, 20 nt, Artificial Sequence
  HTT spacer sequence GTCN PAM
ucagugucuagaugagggac

SEQ ID NO: 25567 - RNA, 20 nt, Artificial Sequence
  HTT spacer sequence GTCN PAM
agaugagggaccucagagga

SEQ ID NO: 25568 - RNA, 20 nt, Artificial Sequence
  HTT spacer sequence GTCN PAM
cucaucuagacacugaagac

SEQ ID NO: 25569 - RNA, 20 nt, Artificial Sequence
  HTT spacer sequence GTCN PAM
ucugaggucccucaucuaga

SEQ ID NO: 25570 - RNA, 20 nt, Artificial Sequence
  HTT spacer sequence GTCN PAM
cuggagcugcaguucaaugu

SEQ ID NO: 25571 - RNA, 20 nt, Artificial Sequence
  HTT spacer sequence GTCN PAM
cggggcagcuggcuacauug

SEQ ID NO: 25572 - RNA, 20 nt, Artificial Sequence
  HTT spacer sequence GTCN PAM
gacacggugugaugagcuca

SEQ ID NO: 25573 - RNA, 20 nt, Artificial Sequence
  HTT spacer sequence GTCN PAM
gacauauccacaaaucagcu

SEQ ID NO: 25574 - RNA, 20 nt, Artificial Sequence
  HTT spacer sequence GTCN PAM
uccuccccacaucugccccu

SEQ ID NO: 25575 - RNA, 20 nt, Artificial Sequence
  HTT spacer sequence GTCN PAM
uaucaagcuagaaacagguc

SEQ ID NO: 25576 - RNA, 20 nt, Artificial Sequence
  HTT spacer sequence GTCN PAM
ccacaagucuucauuuccac

SEQ ID NO: 25577 - RNA, 20 nt, Artificial Sequence
  HTT spacer sequence GTCN PAM
ucauuuccacucaccaaguc

SEQ ID NO: 25578 - RNA, 20 nt, Artificial Sequence
  HTT spacer sequence GTCN PAM
uuuguuuccccuacuaaaua

SEQ ID NO: 25579 - RNA, 20 nt, Artificial Sequence
  HTT spacer sequence GTCN PAM
ccaaccucuguuaaaaaccg

SEQ ID NO: 25580 - RNA, 20 nt, Artificial Sequence
  HTT spacer sequence GTCN PAM
gguuuuuaacagagguuggg

SEQ ID NO: 25581 - RNA, 20 nt, Artificial Sequence
  HTT spacer sequence GTCN PAM
cggccucccaaaguucugga

SEQ ID NO: 25582 - RNA, 20 nt, Artificial Sequence
  HTT spacer sequence GTCN PAM
ggagaucgagaccauuccgg

SEQ ID NO: 25583 - RNA, 20 nt, Artificial Sequence
  HTT spacer sequence GTCN PAM
cgaucuccugaccuugugau

SEQ ID NO: 25584 - RNA, 20 nt, Artificial Sequence
  HTT spacer sequence GTCN PAM
cuacuaaaaauacaaaaaaa

SEQ ID NO: 25585 - RNA, 20 nt, Artificial Sequence
  HTT spacer sequence GTCN PAM
cagcuaccugggaggcugau

SEQ ID NO: 25586 - RNA, 20 nt, Artificial Sequence
  HTT spacer sequence GTCN PAM
cccaggcuggagugcaaugg

SEQ ID NO: 25587 - RNA, 20 nt, Artificial Sequence
  HTT spacer sequence GTCN PAM
cgcucugucgcccaggcugg

SEQ ID NO: 25588 - RNA, 20 nt, Artificial Sequence
  HTT spacer sequence GTCN PAM
caaaaacaaaacaaaacaaa

SEQ ID NO: 25589 - RNA, 20 nt, Artificial Sequence
  HTT spacer sequence GTCN PAM
uuacagaagugugagaacga

SEQ ID NO: 25590 - RNA, 20 nt, Artificial Sequence
  HTT spacer sequence GTCN PAM
cagguaugucuuuacagaag

SEQ ID NO: 25591 - RNA, 20 nt, Artificial Sequence
  HTT spacer sequence GTCN PAM
uggcagaaggugaaggggaa

SEQ ID NO: 25592 - RNA, 20 nt, Artificial Sequence
  HTT spacer sequence GTCN PAM
cucucucucucuccuucucu

SEQ ID NO: 25593 - RNA, 20 nt, Artificial Sequence
  HTT spacer sequence GTCN PAM
gagguggggccuggugggag

SEQ ID NO: 25594 - RNA, 20 nt, Artificial Sequence
  HTT spacer sequence GTCN PAM
ccacccaaaucucaugcuga

SEQ ID NO: 25595 - RNA, 20 nt, Artificial Sequence
  HTT spacer sequence GTCN PAM
uccacagaaccggucccugg

SEQ ID NO: 25596 - RNA, 20 nt, Artificial Sequence
  HTT spacer sequence GTCN PAM
cuggugccaaaaaguuuggg

SEQ ID NO: 25597 - RNA, 20 nt, Artificial Sequence
  HTT spacer sequence GTCN PAM
ccaaacuuuuuggcaccagg

SEQ ID NO: 25598 - RNA, 20 nt, Artificial Sequence
  HTT spacer sequence GTCN PAM
auguacaggugcaugcauau

SEQ ID NO: 25599 - RNA, 20 nt, Artificial Sequence
  HTT spacer sequence GTCN PAM
agacugauauacuaucucau

SEQ ID NO: 25600 - RNA, 20 nt, Artificial Sequence
  HTT spacer sequence GTCN PAM
ggaccagaaguggcagagaa

SEQ ID NO: 25601 - RNA, 20 nt, Artificial Sequence
  HTT spacer sequence GTCN PAM
uucuguugcccagcuuggag

SEQ ID NO: 25602 - RNA, 20 nt, Artificial Sequence
  HTT spacer sequence GTCN PAM
ugaucauagcucacugcggc

SEQ ID NO: 25603 - RNA, 20 nt, Artificial Sequence
  HTT spacer sequence GTCN PAM
caacuacugagaaggcugag

SEQ ID NO: 25604 - RNA, 20 nt, Artificial Sequence
  HTT spacer sequence GTCN PAM
caaaaaaaaaaaaaaaucaa

SEQ ID NO: 25605 - RNA, 20 nt, Artificial Sequence
  HTT spacer sequence GTCN PAM
cagccugucgcccaggcugg

SEQ ID NO: 25606 - RNA, 20 nt, Artificial Sequence
  HTT spacer sequence GTCN PAM
cccaggcuggaguggguugg

SEQ ID NO: 25607 - RNA, 20 nt, Artificial Sequence
  HTT spacer sequence GTCN PAM
cuacuaaaaauacaaaaagu

SEQ ID NO: 25608 - RNA, 20 nt, Artificial Sequence
  HTT spacer sequence GTCN PAM
cgaacuugugaccucgugau

SEQ ID NO: 25609 - RNA, 20 nt, Artificial Sequence
  HTT spacer sequence GTCN PAM
caaguucgagaccagccugg

SEQ ID NO: 25610 - RNA, 20 nt, Artificial Sequence
  HTT spacer sequence GTCN PAM
cugugacucuacgucuucug

SEQ ID NO: 25611 - RNA, 20 nt, Artificial Sequence
  HTT spacer sequence GTCN PAM
cagagacagaaggcagguua

SEQ ID NO: 25612 - RNA, 20 nt, Artificial Sequence
  HTT spacer sequence GTCN PAM
ucuggacauuacuguggaug

SEQ ID NO: 25613 - RNA, 20 nt, Artificial Sequence
  HTT spacer sequence GTCN PAM
agaagacguagagucacaga

SEQ ID NO: 25614 - RNA, 20 nt, Artificial Sequence
  HTT spacer sequence GTCN PAM
gugagcuugugacuggugcc

SEQ ID NO: 25615 - RNA, 20 nt, Artificial Sequence
  HTT spacer sequence GTCN PAM
caagcucacugacuguauga

SEQ ID NO: 25616 - RNA, 20 nt, Artificial Sequence
  HTT spacer sequence GTCN PAM
caauuuaaaaaaaaaagaaa

SEQ ID NO: 25617 - RNA, 20 nt, Artificial Sequence
  HTT spacer sequence GTCN PAM
cagccacucgggaggcugag

SEQ ID NO: 25618 - RNA, 20 nt, Artificial Sequence
  HTT spacer sequence GTCN PAM
ccaugccuggcuaauuuuuu

SEQ ID NO: 25619 - RNA, 20 nt, Artificial Sequence
  HTT spacer sequence GTCN PAM
cgaucuccugacuucaugau

SEQ ID NO: 25620 - RNA, 20 nt, Artificial Sequence
  HTT spacer sequence GTCN PAM
ggagaucgagaccacccugg

SEQ ID NO: 25621 - RNA, 20 nt, Artificial Sequence
  HTT spacer sequence GTCN PAM
gcauuucuucccugaugccu

SEQ ID NO: 25622 - RNA, 20 nt, Artificial Sequence
  HTT spacer sequence GTCN PAM
augcacccgauuguagccau

SEQ ID NO: 25623 - RNA, 20 nt, Artificial Sequence
  HTT spacer sequence GTCN PAM
ccuuaaaccauaauaggaug

SEQ ID NO: 25624 - RNA, 20 nt, Artificial Sequence
  HTT spacer sequence GTCN PAM
uagucagcauggguugccau

SEQ ID NO: 25625 - RNA, 20 nt, Artificial Sequence
  HTT spacer sequence GTCN PAM
gcauggguugccauaacaaa

SEQ ID NO: 25626 - RNA, 20 nt, Artificial Sequence
  HTT spacer sequence GTCN PAM
aagauccaggacuuucgccu

SEQ ID NO: 25627 - RNA, 20 nt, Artificial Sequence
  HTT spacer sequence GTCN PAM
uggaucuuggacuucccaac

SEQ ID NO: 25628 - RNA, 20 nt, Artificial Sequence
  HTT spacer sequence GTCN PAM
gcccucaugacccagucacc

SEQ ID NO: 25629 - RNA, 20 nt, Artificial Sequence
  HTT spacer sequence GTCN PAM
ugagggcagaccccucauga

SEQ ID NO: 25630 - RNA, 20 nt, Artificial Sequence
  HTT spacer sequence GTCN PAM
ccucccaaaggccccaccuc

SEQ ID NO: 25631 - RNA, 20 nt, Artificial Sequence
  HTT spacer sequence GTCN PAM
cccaaauuuauacacugaaa

SEQ ID NO: 25632 - RNA, 20 nt, Artificial Sequence
  HTT spacer sequence GTCN PAM
auagucccccaaauuuauac

SEQ ID NO: 25633 - RNA, 20 nt, Artificial Sequence
  HTT spacer sequence GTCN PAM
uagcucugcuacuuacucac

SEQ ID NO: 25634 - RNA, 20 nt, Artificial Sequence
  HTT spacer sequence GTCN PAM
gucaucuugccuucacucug

SEQ ID NO: 25635 - RNA, 20 nt, Artificial Sequence
  HTT spacer sequence GTCN PAM
ucuugccuucacucugcucc

SEQ ID NO: 25636 - RNA, 20 nt, Artificial Sequence
  HTT spacer sequence GTCN PAM
cgauguucuauaugcucuca

SEQ ID NO: 25637 - RNA, 20 nt, Artificial Sequence
  HTT spacer sequence GTCN PAM
acaaauccagauguauucau

SEQ ID NO: 25638 - RNA, 20 nt, Artificial Sequence
  HTT spacer sequence GTCN PAM
cagcugguuaccagcaaagc

SEQ ID NO: 25639 - RNA, 20 nt, Artificial Sequence
  HTT spacer sequence GTCN PAM
cgaacuccaagcuccaguga

SEQ ID NO: 25640 - RNA, 20 nt, Artificial Sequence
  HTT spacer sequence GTCN PAM
ccucaagaaauuaaaaaauu

SEQ ID NO: 25641 - RNA, 20 nt, Artificial Sequence
  HTT spacer sequence GTCN PAM
caucuacucuggaggcugag

SEQ ID NO: 25642 - RNA, 20 nt, Artificial Sequence
  HTT spacer sequence GTCN PAM
cccaggauggggugcaauca

SEQ ID NO: 25643 - RNA, 20 nt, Artificial Sequence
  HTT spacer sequence GTCN PAM
cacucgucacccaggauggg

SEQ ID NO: 25644 - RNA, 20 nt, Artificial Sequence
  HTT spacer sequence GTCN PAM
caaaaaagaaaaaaaaaaug

SEQ ID NO: 25645 - RNA, 20 nt, Artificial Sequence
  HTT spacer sequence GTCN PAM
uggcgucauggccaacauag

SEQ ID NO: 25646 - RNA, 20 nt, Artificial Sequence
  HTT spacer sequence GTCN PAM
uggccaacauagaaugcccu

SEQ ID NO: 25647 - RNA, 20 nt, Artificial Sequence
  HTT spacer sequence GTCN PAM
cuaccauguaucauugugug

SEQ ID NO: 25648 - RNA, 20 nt, Artificial Sequence
  HTT spacer sequence GTCN PAM
gaacuguacauaucaggguc

SEQ ID NO: 25649 - RNA, 20 nt, Artificial Sequence
  HTT spacer sequence GTCN PAM
aagaacaaaaugagugacau

SEQ ID NO: 25650 - RNA, 20 nt, Artificial Sequence
  HTT spacer sequence GTCN PAM
cucauuuuguucuuggaccc

SEQ ID NO: 25651 - RNA, 20 nt, Artificial Sequence
  HTT spacer sequence GTCN PAM
cauccgacgaaaggggaagg

SEQ ID NO: 25652 - RNA, 20 nt, Artificial Sequence
  HTT spacer sequence GTCN PAM
gaugggacuuagagaagggg

SEQ ID NO: 25653 - RNA, 20 nt, Artificial Sequence
  HTT spacer sequence GTCN PAM
caagaaaggcagugaggcca

SEQ ID NO: 25654 - RNA, 20 nt, Artificial Sequence
  HTT spacer sequence GTCN PAM
cucccuuccccacgcuguuu

SEQ ID NO: 25655 - RNA, 20 nt, Artificial Sequence
  HTT spacer sequence GTCN PAM
uguagaaacauaggauuuaa

SEQ ID NO: 25656 - RNA, 20 nt, Artificial Sequence
  HTT spacer sequence GTCN PAM
uuaguuucuaauaucuugaa

SEQ ID NO: 25657 - RNA, 20 nt, Artificial Sequence
  HTT spacer sequence GTCN PAM
guguacaucagucauuaguu

SEQ ID NO: 25658 - RNA, 20 nt, Artificial Sequence
  HTT spacer sequence GTCN PAM
gaagcauuucuaagugccac

SEQ ID NO: 25659 - RNA, 20 nt, Artificial Sequence
  HTT spacer sequence GTCN PAM
gccaguggcacuuagaaaug

SEQ ID NO: 25660 - RNA, 20 nt, Artificial Sequence
  HTT spacer sequence GTCN PAM
aaaauucugauuggaaaugg

SEQ ID NO: 25661 - RNA, 20 nt, Artificial Sequence
  HTT spacer sequence GTCN PAM
ucugaguuggaggagcuuaa

SEQ ID NO: 25662 - RNA, 20 nt, Artificial Sequence
  HTT spacer sequence GTCN PAM
uccaaacuugugaaugguuu

SEQ ID NO: 25663 - RNA, 20 nt, Artificial Sequence
  HTT spacer sequence GTCN PAM
gaacagaaggggcuaggauu

SEQ ID NO: 25664 - RNA, 20 nt, Artificial Sequence
  HTT spacer sequence GTCN PAM
caccuaaauccuagccccuu

SEQ ID NO: 25665 - RNA, 20 nt, Artificial Sequence
  HTT spacer sequence GTCN PAM
cuucaugcuuugccaggcuc

SEQ ID NO: 25666 - RNA, 20 nt, Artificial Sequence
  HTT spacer sequence GTCN PAM
cagauagcagaggcagcagc

SEQ ID NO: 25667 - RNA, 20 nt, Artificial Sequence
  HTT spacer sequence GTCN PAM
guacagucucccuccagacc

SEQ ID NO: 25668 - RNA, 20 nt, Artificial Sequence
  HTT spacer sequence GTCN PAM
cccuccagacccauucucac

SEQ ID NO: 25669 - RNA, 20 nt, Artificial Sequence
  HTT spacer sequence GTCN PAM
ggagggagacuguacagaca

SEQ ID NO: 25670 - RNA, 20 nt, Artificial Sequence
  HTT spacer sequence GTCN PAM
cuuggcacccaggggccagu

SEQ ID NO: 25671 - RNA, 20 nt, Artificial Sequence
  HTT spacer sequence GTCN PAM
caaaaaaauaaauaaauaaa

SEQ ID NO: 25672 - RNA, 20 nt, Artificial Sequence
  HTT spacer sequence GTCN PAM
cacucugucacccaggcugg

SEQ ID NO: 25673 - RNA, 20 nt, Artificial Sequence
  HTT spacer sequence GTCN PAM
cccaggcuggagugcagugg

SEQ ID NO: 25674 - RNA, 20 nt, Artificial Sequence
  HTT spacer sequence GTCN PAM
cagcuacucaggaggcugag

SEQ ID NO: 25675 - RNA, 20 nt, Artificial Sequence
  HTT spacer sequence GTCN PAM
ccacuaauaaaaaauacaaa

SEQ ID NO: 25676 - RNA, 20 nt, Artificial Sequence
  HTT spacer sequence GTCN PAM
ugaucuccugaccucgugau

SEQ ID NO: 25677 - RNA, 20 nt, Artificial Sequence
  HTT spacer sequence GTCN PAM
ggagaucaagaccauccugg

SEQ ID NO: 25678 - RNA, 20 nt, Artificial Sequence
  HTT spacer sequence GTCN PAM
accucagccucucaaagugc

SEQ ID NO: 25679 - RNA, 20 nt, Artificial Sequence
  HTT spacer sequence GTCN PAM
cuguacccggccuauuuauu

SEQ ID NO: 25680 - RNA, 20 nt, Artificial Sequence
  HTT spacer sequence GTCN PAM
auuaaaaauaaauaaauagg

SEQ ID NO: 25681 - RNA, 20 nt, Artificial Sequence
  HTT spacer sequence GTCN PAM
ggaguucaagaccaaacugg

SEQ ID NO: 25682 - RNA, 20 nt, Artificial Sequence
  HTT spacer sequence GTCN PAM
ugaacucccgaccucgugau

SEQ ID NO: 25683 - RNA, 20 nt, Artificial Sequence
  HTT spacer sequence GTCN PAM
cuacuaaaaauaccacaaaa

SEQ ID NO: 25684 - RNA, 20 nt, Artificial Sequence
  HTT spacer sequence GTCN PAM
ucccagcuacuugggaggcu

SEQ ID NO: 25685 - RNA, 20 nt, Artificial Sequence
  HTT spacer sequence GTCN PAM
cagcuacuugggaggcugag

SEQ ID NO: 25686 - RNA, 20 nt, Artificial Sequence
  HTT spacer sequence GTCN PAM
cgcucuaucgcccaggcuag

SEQ ID NO: 25687 - RNA, 20 nt, Artificial Sequence
  HTT spacer sequence GTCN PAM
caaaaaaaaaaaaaaaagaa

SEQ ID NO: 25688 - RNA, 20 nt, Artificial Sequence
  HTT spacer sequence GTCN PAM
ccaugcuauacaguagaucu

SEQ ID NO: 25689 - RNA, 20 nt, Artificial Sequence
  HTT spacer sequence GTCN PAM
auaaaugaaauuuuguaucc

SEQ ID NO: 25690 - RNA, 20 nt, Artificial Sequence
  HTT spacer sequence GTCN PAM
aggauacaaaauuucauuua

SEQ ID NO: 25691 - RNA, 20 nt, Artificial Sequence
  HTT spacer sequence GTCN PAM
ucuucacccaggcuggagua

SEQ ID NO: 25692 - RNA, 20 nt, Artificial Sequence
  HTT spacer sequence GTCN PAM
cgaacuccugaccucaagug

SEQ ID NO: 25693 - RNA, 20 nt, Artificial Sequence
  HTT spacer sequence GTCN PAM
ggaguucgagaccagccugg

SEQ ID NO: 25694 - RNA, 20 nt, Artificial Sequence
  HTT spacer sequence GTCN PAM
auccuuagaaaagagcaucu

SEQ ID NO: 25695 - RNA, 20 nt, Artificial Sequence
  HTT spacer sequence GTCN PAM
aucuuccuccuguacuacag

SEQ ID NO: 25696 - RNA, 20 nt, Artificial Sequence
  HTT spacer sequence GTCN PAM
uuaguuuauuuaauucauca

SEQ ID NO: 25697 - RNA, 20 nt, Artificial Sequence
  HTT spacer sequence GTCN PAM
aaagucuucaaacugaagua

SEQ ID NO: 25698 - RNA, 20 nt, Artificial Sequence
  HTT spacer sequence GTCN PAM
ucaaacugaaguagaauagu

SEQ ID NO: 25699 - RNA, 20 nt, Artificial Sequence
  HTT spacer sequence GTCN PAM
uuaaaacauuuuuacaucau

SEQ ID NO: 25700 - RNA, 20 nt, Artificial Sequence
  HTT spacer sequence GTCN PAM
uugaaucagcugcuccuaug

SEQ ID NO: 25701 - RNA, 20 nt, Artificial Sequence
  HTT spacer sequence GTCN PAM
auuucucauuacuucuaguu

SEQ ID NO: 25702 - RNA, 20 nt, Artificial Sequence
  HTT spacer sequence GTCN PAM
gaggaaauacuugaauauuu

SEQ ID NO: 25703 - RNA, 20 nt, Artificial Sequence
  HTT spacer sequence GTCN PAM
agaagcuuuaaaaauaugca

SEQ ID NO: 25704 - RNA, 20 nt, Artificial Sequence
  HTT spacer sequence GTCN PAM
uguuacaacaaguaaauccu

SEQ ID NO: 25705 - RNA, 20 nt, Artificial Sequence
  HTT spacer sequence GTCN PAM
ugaaagcuacacacgcuaac

SEQ ID NO: 25706 - RNA, 20 nt, Artificial Sequence
  HTT spacer sequence GTCN PAM
aauggauaguugauguuuuu

SEQ ID NO: 25707 - RNA, 20 nt, Artificial Sequence
  HTT spacer sequence GTCN PAM
uucagcuuuguuuaugauag

SEQ ID NO: 25708 - RNA, 20 nt, Artificial Sequence
  HTT spacer sequence GTCN PAM
cuguaaucaaucuuagcugu

SEQ ID NO: 25709 - RNA, 20 nt, Artificial Sequence
  HTT spacer sequence GTCN PAM
ggagggauccguguacaggc

SEQ ID NO: 25710 - RNA, 20 nt, Artificial Sequence
  HTT spacer sequence GTCN PAM
ugcagguacccucugccuaa

SEQ ID NO: 25711 - RNA, 20 nt, Artificial Sequence
  HTT spacer sequence GTCN PAM
ggaauuguggcucauguuag

SEQ ID NO: 25712 - RNA, 20 nt, Artificial Sequence
  HTT spacer sequence GTCN PAM
gggcauggugagccacuugu

SEQ ID NO: 25713 - RNA, 20 nt, Artificial Sequence
  HTT spacer sequence GTCN PAM
gcguaagaaacuguucacca

SEQ ID NO: 25714 - RNA, 20 nt, Artificial Sequence
  HTT spacer sequence GTCN PAM
agggauguuuuaguuuuuua

SEQ ID NO: 25715 - RNA, 20 nt, Artificial Sequence
  HTT spacer sequence GTCN PAM
aauuuaauuuuuguuuuugg

SEQ ID NO: 25716 - RNA, 20 nt, Artificial Sequence
  HTT spacer sequence GTCN PAM
ccaauaauguuuacagaaga

SEQ ID NO: 25717 - RNA, 20 nt, Artificial Sequence
  HTT spacer sequence GTCN PAM
gcucaucuauuagaagcauc

SEQ ID NO: 25718 - RNA, 20 nt, Artificial Sequence
  HTT spacer sequence GTCN PAM
aaaaaagaaaaaaaaaaaac

SEQ ID NO: 25719 - RNA, 20 nt, Artificial Sequence
  HTT spacer sequence GTCN PAM
ugcucuguccccagguugga

SEQ ID NO: 25720 - RNA, 20 nt, Artificial Sequence
  HTT spacer sequence GTCN PAM
ccagguuggagugcaguggu

SEQ ID NO: 25721 - RNA, 20 nt, Artificial Sequence
  HTT spacer sequence GTCN PAM
cagggcucaagugauccucc

SEQ ID NO: 25722 - RNA, 20 nt, Artificial Sequence
  HTT spacer sequence GTCN PAM
cagguacucaggagcugagg

SEQ ID NO: 25723 - RNA, 20 nt, Artificial Sequence
  HTT spacer sequence GTCN PAM
cuacaaaaaauguaaaaauu

SEQ ID NO: 25724 - RNA, 20 nt, Artificial Sequence
  HTT spacer sequence GTCN PAM
cccuaaguugccugggcugg

SEQ ID NO: 25725 - RNA, 20 nt, Artificial Sequence
  HTT spacer sequence GTCN PAM
caagcuccuggcuuaaguaa

SEQ ID NO: 25726 - RNA, 20 nt, Artificial Sequence
  HTT spacer sequence GTCN PAM
cccuguccagaaugugggau

SEQ ID NO: 25727 - RNA, 20 nt, Artificial Sequence
  HTT spacer sequence GTCN PAM
agaaugugggaugcuuuccu

SEQ ID NO: 25728 - RNA, 20 nt, Artificial Sequence
  HTT spacer sequence GTCN PAM
ucauauuuuacaagguuuga

SEQ ID NO: 25729 - RNA, 20 nt, Artificial Sequence
  HTT spacer sequence GTCN PAM
cuuuaagcugcaugguucuc

SEQ ID NO: 25730 - RNA, 20 nt, Artificial Sequence
  HTT spacer sequence GTCN PAM
gcucccaaagcagaagacgg

SEQ ID NO: 25731 - RNA, 20 nt, Artificial Sequence
  HTT spacer sequence GTCN PAM
ucugcuuugggagcugacau

SEQ ID NO: 25732 - RNA, 20 nt, Artificial Sequence
  HTT spacer sequence GTCN PAM
aagaugccagggaggccaga

SEQ ID NO: 25733 - RNA, 20 nt, Artificial Sequence
  HTT spacer sequence GTCN PAM
uccccgcggucagcuccugc

SEQ ID NO: 25734 - RNA, 20 nt, Artificial Sequence
  HTT spacer sequence GTCN PAM
gcuccugcugcgcagcuucu

SEQ ID NO: 25735 - RNA, 20 nt, Artificial Sequence
  HTT spacer sequence GTCN PAM
ugcuggaucuuugaguauug

SEQ ID NO: 25736 - RNA, 20 nt, Artificial Sequence
  HTT spacer sequence GTCN PAM
ccacuccccauuucuugugu

SEQ ID NO: 25737 - RNA, 20 nt, Artificial Sequence
  HTT spacer sequence GTCN PAM
ucccugguuucuugcuuugg

SEQ ID NO: 25738 - RNA, 20 nt, Artificial Sequence
  HTT spacer sequence GTCN PAM
ccacagaacuuuugcagcuc

SEQ ID NO: 25739 - RNA, 20 nt, Artificial Sequence
  HTT spacer sequence GTCN PAM
ucagaagagcugcaaaaguu

SEQ ID NO: 25740 - RNA, 20 nt, Artificial Sequence
  HTT spacer sequence GTCN PAM
ugagaugagaauuaagauga

SEQ ID NO: 25741 - RNA, 20 nt, Artificial Sequence
  HTT spacer sequence GTCN PAM
aggagaggucagauugcugu

SEQ ID NO: 25742 - RNA, 20 nt, Artificial Sequence
  HTT spacer sequence GTCN PAM
gauugcugugcauauuggag

SEQ ID NO: 25743 - RNA, 20 nt, Artificial Sequence
  HTT spacer sequence GTCN PAM
ugugagaugaagagcccagg

SEQ ID NO: 25744 - RNA, 20 nt, Artificial Sequence
  HTT spacer sequence GTCN PAM
aaggaacgaggugauguggu

SEQ ID NO: 25745 - RNA, 20 nt, Artificial Sequence
  HTT spacer sequence GTCN PAM
cugcuggauuuuucuuuccu

SEQ ID NO: 25746 - RNA, 20 nt, Artificial Sequence
  HTT spacer sequence GTCN PAM
accugggugugcccuaaggc

SEQ ID NO: 25747 - RNA, 20 nt, Artificial Sequence
  HTT spacer sequence GTCN PAM
ugguauuuagauccacucac

SEQ ID NO: 25748 - RNA, 20 nt, Artificial Sequence
  HTT spacer sequence GTCN PAM
gucucuugccugcuucugac

SEQ ID NO: 25749 - RNA, 20 nt, Artificial Sequence
  HTT spacer sequence GTCN PAM
cuugccugcuucugacuucg

SEQ ID NO: 25750 - RNA, 20 nt, Artificial Sequence
  HTT spacer sequence GTCN PAM
gaagcaggcaagagacagac

SEQ ID NO: 25751 - RNA, 20 nt, Artificial Sequence
  HTT spacer sequence GTCN PAM
gucucgccuuaccuuucuug

SEQ ID NO: 25752 - RNA, 20 nt, Artificial Sequence
  HTT spacer sequence GTCN PAM
cgccuuaccuuucuuguuau

SEQ ID NO: 25753 - RNA, 20 nt, Artificial Sequence
  HTT spacer sequence GTCN PAM
uugguccugacccauucucu

SEQ ID NO: 25754 - RNA, 20 nt, Artificial Sequence
  HTT spacer sequence GTCN PAM
ugacccauucucugagucug

SEQ ID NO: 25755 - RNA, 20 nt, Artificial Sequence
  HTT spacer sequence GTCN PAM
ggaccaaagacaugcauaac

SEQ ID NO: 25756 - RNA, 20 nt, Artificial Sequence
  HTT spacer sequence GTCN PAM
guaaaauagaauugcuguau

SEQ ID NO: 25757 - RNA, 20 nt, Artificial Sequence
  HTT spacer sequence GTCN PAM
aauucacauaggguugguuc

SEQ ID NO: 25758 - RNA, 20 nt, Artificial Sequence
  HTT spacer sequence GTCN PAM
uauuccuuauacacuaggau

SEQ ID NO: 25759 - RNA, 20 nt, Artificial Sequence
  HTT spacer sequence GTCN PAM
aucauaaucaguaucuggua

SEQ ID NO: 25760 - RNA, 20 nt, Artificial Sequence
  HTT spacer sequence GTCN PAM
gcacuggaaaaauauuuugg

SEQ ID NO: 25761 - RNA, 20 nt, Artificial Sequence
  HTT spacer sequence GTCN PAM
gcguguuuguugucagcacu

SEQ ID NO: 25762 - RNA, 20 nt, Artificial Sequence
  HTT spacer sequence GTCN PAM
auguuugugucuuugguugu

SEQ ID NO: 25763 - RNA, 20 nt, Artificial Sequence
  HTT spacer sequence GTCN PAM
uugguuguacauuaugagau

SEQ ID NO: 25764 - RNA, 20 nt, Artificial Sequence
  HTT spacer sequence GTCN PAM
cgaucucauaauguacaacc

SEQ ID NO: 25765 - RNA, 20 nt, Artificial Sequence
  HTT spacer sequence GTCN PAM
cgcuggaucuucagaacagc

SEQ ID NO: 25766 - RNA, 20 nt, Artificial Sequence
  HTT spacer sequence GTCN PAM
ugcaguguggccagcucuag

SEQ ID NO: 25767 - RNA, 20 nt, Artificial Sequence
  HTT spacer sequence GTCN PAM
uguuuuuucuccuuggguug

SEQ ID NO: 25768 - RNA, 20 nt, Artificial Sequence
  HTT spacer sequence GTCN PAM
ucugggcugaguucaucuag

SEQ ID NO: 25769 - RNA, 20 nt, Artificial Sequence
  HTT spacer sequence GTCN PAM
cccggaggcacccuggagaa

SEQ ID NO: 25770 - RNA, 20 nt, Artificial Sequence
  HTT spacer sequence GTCN PAM
caggacccaagucugacucu

SEQ ID NO: 25771 - RNA, 20 nt, Artificial Sequence
  HTT spacer sequence GTCN PAM
ugugacgcaagcacgugggg

SEQ ID NO: 25772 - RNA, 20 nt, Artificial Sequence
  HTT spacer sequence GTCN PAM
gacucugccuuagccaugaa

SEQ ID NO: 25773 - RNA, 20 nt, Artificial Sequence
  HTT spacer sequence GTCN PAM
gacuuggguccugugacgca

SEQ ID NO: 25774 - RNA, 20 nt, Artificial Sequence
  HTT spacer sequence GTCN PAM
guuaucauguauuagcuuag

SEQ ID NO: 25775 - RNA, 20 nt, Artificial Sequence
  HTT spacer sequence GTCN PAM
aagcuaauacaugauaacag

SEQ ID NO: 25776 - RNA, 20 nt, Artificial Sequence
  HTT spacer sequence GTCN PAM
uuuauuucuuaacuugaccu

SEQ ID NO: 25777 - RNA, 20 nt, Artificial Sequence
  HTT spacer sequence GTCN PAM
aguuaagaaauaaaggacuc

SEQ ID NO: 25778 - RNA, 20 nt, Artificial Sequence
  HTT spacer sequence GTCN PAM
guuuugccccuuuccacuug

SEQ ID NO: 25779 - RNA, 20 nt, Artificial Sequence
  HTT spacer sequence GTCN PAM
caccucccgccccgcccccu

SEQ ID NO: 25780 - RNA, 20 nt, Artificial Sequence
  HTT spacer sequence GTCN PAM
accccagcucuguuacuucc

SEQ ID NO: 25781 - RNA, 20 nt, Artificial Sequence
  HTT spacer sequence GTCN PAM
uauucucugacacagauagu

SEQ ID NO: 25782 - RNA, 20 nt, Artificial Sequence
  HTT spacer sequence GTCN PAM
gagaauaugacugucaaccc

SEQ ID NO: 25783 - RNA, 20 nt, Artificial Sequence
  HTT spacer sequence GTCN PAM
cugacuuaucucacagaaag

SEQ ID NO: 25784 - RNA, 20 nt, Artificial Sequence
  HTT spacer sequence GTCN PAM
gagacuaucugugucagaga

SEQ ID NO: 25785 - RNA, 20 nt, Artificial Sequence
  HTT spacer sequence GTCN PAM
gcggcagagccugaguuaaa

SEQ ID NO: 25786 - RNA, 20 nt, Artificial Sequence
  HTT spacer sequence GTCN PAM
cguagauuuucuuuuucuuu

SEQ ID NO: 25787 - RNA, 20 nt, Artificial Sequence
  HTT spacer sequence GTCN PAM
ccucacuccccaugggcccc

SEQ ID NO: 25788 - RNA, 20 nt, Artificial Sequence
  HTT spacer sequence GTCN PAM
uuugcaggcacauggaugau

SEQ ID NO: 25789 - RNA, 20 nt, Artificial Sequence
  HTT spacer sequence GTCN PAM
aucauugauggacauucggg

SEQ ID NO: 25790 - RNA, 20 nt, Artificial Sequence
  HTT spacer sequence GTCN PAM
aucaaugauagacuggauua

SEQ ID NO: 25791 - RNA, 20 nt, Artificial Sequence
  HTT spacer sequence GTCN PAM
uugcuauugugacuagugcc

SEQ ID NO: 25792 - RNA, 20 nt, Artificial Sequence
  HTT spacer sequence GTCN PAM
caauagcaaagacuuggaac

SEQ ID NO: 25793 - RNA, 20 nt, Artificial Sequence
  HTT spacer sequence GTCN PAM
uuaucguagaaugauuuaua

SEQ ID NO: 25794 - RNA, 20 nt, Artificial Sequence
  HTT spacer sequence GTCN PAM
aaugguauuucuaguucuag

SEQ ID NO: 25795 - RNA, 20 nt, Artificial Sequence
  HTT spacer sequence GTCN PAM
agaacuagaaauaccauuug

SEQ ID NO: 25796 - RNA, 20 nt, Artificial Sequence
  HTT spacer sequence GTCN PAM
ggcgauuccucaaaggucua

SEQ ID NO: 25797 - RNA, 20 nt, Artificial Sequence
  HTT spacer sequence GTCN PAM
uccacaauaguugaacuaau

SEQ ID NO: 25798 - RNA, 20 nt, Artificial Sequence
  HTT spacer sequence GTCN PAM
cgaaacaacagaugcuggag

SEQ ID NO: 25799 - RNA, 20 nt, Artificial Sequence
  HTT spacer sequence GTCN PAM
uuagagaaaugcagaucaaa

SEQ ID NO: 25800 - RNA, 20 nt, Artificial Sequence
  HTT spacer sequence GTCN PAM
guuggcugcauaaaugucuu

SEQ ID NO: 25801 - RNA, 20 nt, Artificial Sequence
  HTT spacer sequence GTCN PAM
ucuuuugcgaagugucuguu

SEQ ID NO: 25802 - RNA, 20 nt, Artificial Sequence
  HTT spacer sequence GTCN PAM
guucauauccuuuguccauu

SEQ ID NO: 25803 - RNA, 20 nt, Artificial Sequence
  HTT spacer sequence GTCN PAM
auuuuuugaugggguuguuu

SEQ ID NO: 25804 - RNA, 20 nt, Artificial Sequence
  HTT spacer sequence GTCN PAM
gauggguagauugcaaaaau

SEQ ID NO: 25805 - RNA, 20 nt, Artificial Sequence
  HTT spacer sequence GTCN PAM
auuuuggcuuuuguugccau

SEQ ID NO: 25806 - RNA, 20 nt, Artificial Sequence
  HTT spacer sequence GTCN PAM
aaaacaccaaaagcaauggc

SEQ ID NO: 25807 - RNA, 20 nt, Artificial Sequence
  HTT spacer sequence GTCN PAM
uugccuaugccuauguccug

SEQ ID NO: 25808 - RNA, 20 nt, Artificial Sequence
  HTT spacer sequence GTCN PAM
ugaauguuauggcccagguu

SEQ ID NO: 25809 - RNA, 20 nt, Artificial Sequence
  HTT spacer sequence GTCN PAM
uaggucuuauguuuaagucu

SEQ ID NO: 25810 - RNA, 20 nt, Artificial Sequence
  HTT spacer sequence GTCN PAM
uauguuuaagucuuugaucc

SEQ ID NO: 25811 - RNA, 20 nt, Artificial Sequence
  HTT spacer sequence GTCN PAM
uugauccaucuugaguugau

SEQ ID NO: 25812 - RNA, 20 nt, Artificial Sequence
  HTT spacer sequence GTCN PAM
aguuucaguuuucugcaugu

SEQ ID NO: 25813 - RNA, 20 nt, Artificial Sequence
  HTT spacer sequence GTCN PAM
gguuugucaaagaucagaug

SEQ ID NO: 25814 - RNA, 20 nt, Artificial Sequence
  HTT spacer sequence GTCN PAM
aagaucagaugauuguagau

SEQ ID NO: 25815 - RNA, 20 nt, Artificial Sequence
  HTT spacer sequence GTCN PAM
auauaucuguuuugguacca

SEQ ID NO: 25816 - RNA, 20 nt, Artificial Sequence
  HTT spacer sequence GTCN PAM
gguagugugaugccuccagc

SEQ ID NO: 25817 - RNA, 20 nt, Artificial Sequence
  HTT spacer sequence GTCN PAM
uggcuaugcaggcucuuuuu

SEQ ID NO: 25818 - RNA, 20 nt, Artificial Sequence
  HTT spacer sequence GTCN PAM
gugauagcuugaugggggga

SEQ ID NO: 25819 - RNA, 20 nt, Artificial Sequence
  HTT spacer sequence GTCN PAM
uauccaugaacauggaaugu

SEQ ID NO: 25820 - RNA, 20 nt, Artificial Sequence
  HTT spacer sequence GTCN PAM
ucucuuauuuccuugagcag

SEQ ID NO: 25821 - RNA, 20 nt, Artificial Sequence
  HTT spacer sequence GTCN PAM
uucacaucccuuguaaguug

SEQ ID NO: 25822 - RNA, 20 nt, Artificial Sequence
  HTT spacer sequence GTCN PAM
uccuagguguuucauucccu

SEQ ID NO: 25823 - RNA, 20 nt, Artificial Sequence
  HTT spacer sequence GTCN PAM
guuauugguguauaggaaug

SEQ ID NO: 25824 - RNA, 20 nt, Artificial Sequence
  HTT spacer sequence GTCN PAM
caggauacaaaaucaaugug

SEQ ID NO: 25825 - RNA, 20 nt, Artificial Sequence
  HTT spacer sequence GTCN PAM
ucugcaaacagggacaguuu

SEQ ID NO: 25826 - RNA, 20 nt, Artificial Sequence
  HTT spacer sequence GTCN PAM
cuguuugcagaugacaugau

SEQ ID NO: 25827 - RNA, 20 nt, Artificial Sequence
  HTT spacer sequence GTCN PAM
ugugccgguuuucgaaggga

SEQ ID NO: 25828 - RNA, 20 nt, Artificial Sequence
  HTT spacer sequence GTCN PAM
uaaauagcucuuacuauguu

SEQ ID NO: 25829 - RNA, 20 nt, Artificial Sequence
  HTT spacer sequence GTCN PAM
aaggccuuuucugcaucugu

SEQ ID NO: 25830 - RNA, 20 nt, Artificial Sequence
  HTT spacer sequence GTCN PAM
gcuucaucccuggaaugcaa

SEQ ID NO: 25831 - RNA, 20 nt, Artificial Sequence
  HTT spacer sequence GTCN PAM
cugccaggcuuugguaucag

SEQ ID NO: 25832 - RNA, 20 nt, Artificial Sequence
  HTT spacer sequence GTCN PAM
aggauggauucacagccgaa

SEQ ID NO: 25833 - RNA, 20 nt, Artificial Sequence
  HTT spacer sequence GTCN PAM
auucagagauucagcuuuuu

SEQ ID NO: 25834 - RNA, 20 nt, Artificial Sequence
  HTT spacer sequence GTCN PAM
ugggaggguguaugugucca

SEQ ID NO: 25835 - RNA, 20 nt, Artificial Sequence
  HTT spacer sequence GTCN PAM
aggaauuuauccauuucuuc

SEQ ID NO: 25836 - RNA, 20 nt, Artificial Sequence
  HTT spacer sequence GTCN PAM
auuugauucuucucucuuuu

SEQ ID NO: 25837 - RNA, 20 nt, Artificial Sequence
  HTT spacer sequence GTCN PAM
ugcuagcggucuaccuauuu

SEQ ID NO: 25838 - RNA, 20 nt, Artificial Sequence
  HTT spacer sequence GTCN PAM
accuauuuuauugaucuuuu

SEQ ID NO: 25839 - RNA, 20 nt, Artificial Sequence
  HTT spacer sequence GTCN PAM
cuaucuccuucaguucugcu

SEQ ID NO: 25840 - RNA, 20 nt, Artificial Sequence
  HTT spacer sequence GTCN PAM
ucugcuagcuuuugaauuug

SEQ ID NO: 25841 - RNA, 20 nt, Artificial Sequence
  HTT spacer sequence GTCN PAM
cagagauucugguauguugu

SEQ ID NO: 25842 - RNA, 20 nt, Artificial Sequence
  HTT spacer sequence GTCN PAM
ucguucucauugguuuccaa

SEQ ID NO: 25843 - RNA, 20 nt, Artificial Sequence
  HTT spacer sequence GTCN PAM
uucaagagcagguuguucag

SEQ ID NO: 25844 - RNA, 20 nt, Artificial Sequence
  HTT spacer sequence GTCN PAM
gacagacaguuuguugugau

SEQ ID NO: 25845 - RNA, 20 nt, Artificial Sequence
  HTT spacer sequence GTCN PAM
gaccacagugcaaucaaauu

SEQ ID NO: 25846 - RNA, 20 nt, Artificial Sequence
  HTT spacer sequence GTCN PAM
gucagaccacagugcaauca

SEQ ID NO: 25847 - RNA, 20 nt, Artificial Sequence
  HTT spacer sequence GTCN PAM
guuuuagaauaagugcaaug

SEQ ID NO: 25848 - RNA, 20 nt, Artificial Sequence
  HTT spacer sequence GTCN PAM
auuagguccgcuugguccag

SEQ ID NO: 25849 - RNA, 20 nt, Artificial Sequence
  HTT spacer sequence GTCN PAM
gcuugguccagugcugaguu

SEQ ID NO: 25850 - RNA, 20 nt, Artificial Sequence
  HTT spacer sequence GTCN PAM
agugcugaguucaaguccug

SEQ ID NO: 25851 - RNA, 20 nt, Artificial Sequence
  HTT spacer sequence GTCN PAM
uggauauccuuguuaauuuu

SEQ ID NO: 25852 - RNA, 20 nt, Artificial Sequence
  HTT spacer sequence GTCN PAM
auauuaggcagaucaaugag

SEQ ID NO: 25853 - RNA, 20 nt, Artificial Sequence
  HTT spacer sequence GTCN PAM
cccacuauuaccggguggga

SEQ ID NO: 25854 - RNA, 20 nt, Artificial Sequence
  HTT spacer sequence GTCN PAM
cuuuguaggucucuaagaac

SEQ ID NO: 25855 - RNA, 20 nt, Artificial Sequence
  HTT spacer sequence GTCN PAM
cuaagaacuugcuucaugaa

SEQ ID NO: 25856 - RNA, 20 nt, Artificial Sequence
  HTT spacer sequence GTCN PAM
ccuuugaacuuuguugauuu

SEQ ID NO: 25857 - RNA, 20 nt, Artificial Sequence
  HTT spacer sequence GTCN PAM
guuuuaucagagacuaggau

SEQ ID NO: 25858 - RNA, 20 nt, Artificial Sequence
  HTT spacer sequence GTCN PAM
cugauaaaacagacuuuaaa

SEQ ID NO: 25859 - RNA, 20 nt, Artificial Sequence
  HTT spacer sequence GTCN PAM
uugcaugugagaugggucuc

SEQ ID NO: 25860 - RNA, 20 nt, Artificial Sequence
  HTT spacer sequence GTCN PAM
ccugaauacagcacaccaau

SEQ ID NO: 25861 - RNA, 20 nt, Artificial Sequence
  HTT spacer sequence GTCN PAM
ugacucuuuauccaauuugc

SEQ ID NO: 25862 - RNA, 20 nt, Artificial Sequence
  HTT spacer sequence GTCN PAM
agacccauuggugugcugua

SEQ ID NO: 25863 - RNA, 20 nt, Artificial Sequence
  HTT spacer sequence GTCN PAM
gugucuuuuaauuggggcau

SEQ ID NO: 25864 - RNA, 20 nt, Artificial Sequence
  HTT spacer sequence GTCN PAM
uuuaauuggggcauuuagcc

SEQ ID NO: 25865 - RNA, 20 nt, Artificial Sequence
  HTT spacer sequence GTCN PAM
uuaugauccuaguugguuau

SEQ ID NO: 25866 - RNA, 20 nt, Artificial Sequence
  HTT spacer sequence GTCN PAM
guagucuuuacaauuuggca

SEQ ID NO: 25867 - RNA, 20 nt, Artificial Sequence
  HTT spacer sequence GTCN PAM
uuacaauuuggcauguuuuu

SEQ ID NO: 25868 - RNA, 20 nt, Artificial Sequence
  HTT spacer sequence GTCN PAM
ccaccaggccugccuuacaa

SEQ ID NO: 25869 - RNA, 20 nt, Artificial Sequence
  HTT spacer sequence GTCN PAM
guaaaggauuuuauuucucg

SEQ ID NO: 25870 - RNA, 20 nt, Artificial Sequence
  HTT spacer sequence GTCN PAM
gaugggcuucccuuuguggg

SEQ ID NO: 25871 - RNA, 20 nt, Artificial Sequence
  HTT spacer sequence GTCN PAM
gguuacccacaaagggaagc

SEQ ID NO: 25872 - RNA, 20 nt, Artificial Sequence
  HTT spacer sequence GTCN PAM
ugggguugcucuucucgagg

SEQ ID NO: 25873 - RNA, 20 nt, Artificial Sequence
  HTT spacer sequence GTCN PAM
gccuugcuagguuggggaag

SEQ ID NO: 25874 - RNA, 20 nt, Artificial Sequence
  HTT spacer sequence GTCN PAM
uuucacauagucccauauuu

SEQ ID NO: 25875 - RNA, 20 nt, Artificial Sequence
  HTT spacer sequence GTCN PAM
cauauuucuuggaggcuugg

SEQ ID NO: 25876 - RNA, 20 nt, Artificial Sequence
  HTT spacer sequence GTCN PAM
ucucgcuuuauuucauuaau

SEQ ID NO: 25877 - RNA, 20 nt, Artificial Sequence
  HTT spacer sequence GTCN PAM
aagcuuguguauacuucaca

SEQ ID NO: 25878 - RNA, 20 nt, Artificial Sequence
  HTT spacer sequence GTCN PAM
uuuaagcucuucucuacacu

SEQ ID NO: 25879 - RNA, 20 nt, Artificial Sequence
  HTT spacer sequence GTCN PAM
aacauuuuuuucaagguuuu

SEQ ID NO: 25880 - RNA, 20 nt, Artificial Sequence
  HTT spacer sequence GTCN PAM
guaauaacaaacuucuccga

SEQ ID NO: 25881 - RNA, 20 nt, Artificial Sequence
  HTT spacer sequence GTCN PAM
auucaucaaacucauucucc

SEQ ID NO: 25882 - RNA, 20 nt, Artificial Sequence
  HTT spacer sequence GTCN PAM
uugauguuggugaccuacgg

SEQ ID NO: 25883 - RNA, 20 nt, Artificial Sequence
  HTT spacer sequence GTCN PAM
ccaacaucaaagaccaaagg

SEQ ID NO: 25884 - RNA, 20 nt, Artificial Sequence
  HTT spacer sequence GTCN PAM
uuuuuguugauguugaugcu

SEQ ID NO: 25885 - RNA, 20 nt, Artificial Sequence
  HTT spacer sequence GTCN PAM
guuagaaggaaaacuaacaa

SEQ ID NO: 25886 - RNA, 20 nt, Artificial Sequence
  HTT spacer sequence GTCN PAM
guuggaguuugcuggagguc

SEQ ID NO: 25887 - RNA, 20 nt, Artificial Sequence
  HTT spacer sequence GTCN PAM
acuccaggcccuguuugccu

SEQ ID NO: 25888 - RNA, 20 nt, Artificial Sequence
  HTT spacer sequence GTCN PAM
cagagcacgaaggugucugc

SEQ ID NO: 25889 - RNA, 20 nt, Artificial Sequence
  HTT spacer sequence GTCN PAM
gccuguaugagguguuuguu

SEQ ID NO: 25890 - RNA, 20 nt, Artificial Sequence
  HTT spacer sequence GTCN PAM
cccagucaggcuacaugggg

SEQ ID NO: 25891 - RNA, 20 nt, Artificial Sequence
  HTT spacer sequence GTCN PAM
ggcuacaugggggucaggga

SEQ ID NO: 25892 - RNA, 20 nt, Artificial Sequence
  HTT spacer sequence GTCN PAM
gggacccacuugaggcaguc

SEQ ID NO: 25893 - RNA, 20 nt, Artificial Sequence
  HTT spacer sequence GTCN PAM
cugacccccauguagccuga

SEQ ID NO: 25894 - RNA, 20 nt, Artificial Sequence
  HTT spacer sequence GTCN PAM
guucauuaucggagcuugaa

SEQ ID NO: 25895 - RNA, 20 nt, Artificial Sequence
  HTT spacer sequence GTCN PAM
ggcacguauguuuaaaucug

SEQ ID NO: 25896 - RNA, 20 nt, Artificial Sequence
  HTT spacer sequence GTCN PAM
gcugccuuuuguucagaugu

SEQ ID NO: 25897 - RNA, 20 nt, Artificial Sequence
  HTT spacer sequence GTCN PAM
accacugcugaggcuagagu

SEQ ID NO: 25898 - RNA, 20 nt, Artificial Sequence
  HTT spacer sequence GTCN PAM
auuucagagugcugcgcuag

SEQ ID NO: 25899 - RNA, 20 nt, Artificial Sequence
  HTT spacer sequence GTCN PAM
cacgcccauggggccuugcu

SEQ ID NO: 25900 - RNA, 20 nt, Artificial Sequence
  HTT spacer sequence GTCN PAM
gcugguugugaagacugugg

SEQ ID NO: 25901 - RNA, 20 nt, Artificial Sequence
  HTT spacer sequence GTCN PAM
ucacaaccagcagaccagga

SEQ ID NO: 25902 - RNA, 20 nt, Artificial Sequence
  HTT spacer sequence GTCN PAM
cucauggcuuccuuuggcuu

SEQ ID NO: 25903 - RNA, 20 nt, Artificial Sequence
  HTT spacer sequence GTCN PAM
cccgaccccuugugcuuccc

SEQ ID NO: 25904 - RNA, 20 nt, Artificial Sequence
  HTT spacer sequence GTCN PAM
ggggacuucccuuuccaagc

SEQ ID NO: 25905 - RNA, 20 nt, Artificial Sequence
  HTT spacer sequence GTCN PAM
agcaagucccagugagauga

SEQ ID NO: 25906 - RNA, 20 nt, Artificial Sequence
  HTT spacer sequence GTCN PAM
cagugagaugaacuagguac

SEQ ID NO: 25907 - RNA, 20 nt, Artificial Sequence
  HTT spacer sequence GTCN PAM
ucugugucgaucucacuggg

SEQ ID NO: 25908 - RNA, 20 nt, Artificial Sequence
  HTT spacer sequence GTCN PAM
aucucacugggagcuguaga

SEQ ID NO: 25909 - RNA, 20 nt, Artificial Sequence
  HTT spacer sequence GTCN PAM
acagcucccagugagaucga

SEQ ID NO: 25910 - RNA, 20 nt, Artificial Sequence
  HTT spacer sequence GTCN PAM
ugcucugucgcccaggcuga

SEQ ID NO: 25911 - RNA, 20 nt, Artificial Sequence
  HTT spacer sequence GTCN PAM
cccaggcugacgugcaucgg

SEQ ID NO: 25912 - RNA, 20 nt, Artificial Sequence
  HTT spacer sequence GTCN PAM
gccugggcgacagagcaaga

SEQ ID NO: 25913 - RNA, 20 nt, Artificial Sequence
  HTT spacer sequence GTCN PAM
cgaacuccugaccuugugau

SEQ ID NO: 25914 - RNA, 20 nt, Artificial Sequence
  HTT spacer sequence GTCN PAM
ggaguucgagacuagccugg

SEQ ID NO: 25915 - RNA, 20 nt, Artificial Sequence
  HTT spacer sequence GTCN PAM
gccaccacgcccagccauau

SEQ ID NO: 25916 - RNA, 20 nt, Artificial Sequence
  HTT spacer sequence GTCN PAM
ccauguauaacacauuuuag

SEQ ID NO: 25917 - RNA, 20 nt, Artificial Sequence
  HTT spacer sequence GTCN PAM
uaauaauaagguuaaaaaaa

SEQ ID NO: 25918 - RNA, 20 nt, Artificial Sequence
  HTT spacer sequence GTCN PAM
uauauagaaauggcuguuuu

SEQ ID NO: 25919 - RNA, 20 nt, Artificial Sequence
  HTT spacer sequence GTCN PAM
gugaauguaucaaaugcugc

SEQ ID NO: 25920 - RNA, 20 nt, Artificial Sequence
  HTT spacer sequence GTCN PAM
caauuuaaugaagauugaug

SEQ ID NO: 25921 - RNA, 20 nt, Artificial Sequence
  HTT spacer sequence GTCN PAM
uuacaguuaaagguagauuu

SEQ ID NO: 25922 - RNA, 20 nt, Artificial Sequence
  HTT spacer sequence GTCN PAM
ugaaacagcaaaaaagauga

SEQ ID NO: 25923 - RNA, 20 nt, Artificial Sequence
  HTT spacer sequence GTCN PAM
uuuagagggggauauguagg

SEQ ID NO: 25924 - RNA, 20 nt, Artificial Sequence
  HTT spacer sequence GTCN PAM
ggggccaagugcaaacaaga

SEQ ID NO: 25925 - RNA, 20 nt, Artificial Sequence
  HTT spacer sequence GTCN PAM
gugagggagauuccucaaaa

SEQ ID NO: 25926 - RNA, 20 nt, Artificial Sequence
  HTT spacer sequence GTCN PAM
ggccaggcuugagauauaca

SEQ ID NO: 25927 - RNA, 20 nt, Artificial Sequence
  HTT spacer sequence GTCN PAM
cagauaaggcucaauaguuu

SEQ ID NO: 25928 - RNA, 20 nt, Artificial Sequence
  HTT spacer sequence GTCN PAM
gagcacaaguguagcuggag

SEQ ID NO: 25929 - RNA, 20 nt, Artificial Sequence
  HTT spacer sequence GTCN PAM
ccacaucaagcucaccucuc

SEQ ID NO: 25930 - RNA, 20 nt, Artificial Sequence
  HTT spacer sequence GTCN PAM
gaagaaaaccugcucauacc

SEQ ID NO: 25931 - RNA, 20 nt, Artificial Sequence
  HTT spacer sequence GTCN PAM
cugugccuuuaaauccugga

SEQ ID NO: 25932 - RNA, 20 nt, Artificial Sequence
  HTT spacer sequence GTCN PAM
agaauguggaauuauuauuu

SEQ ID NO: 25933 - RNA, 20 nt, Artificial Sequence
  HTT spacer sequence GTCN PAM
ucuaauccuuauuuauucca

SEQ ID NO: 25934 - RNA, 20 nt, Artificial Sequence
  HTT spacer sequence GTCN PAM
auaauauaaugcaaaagaaa

SEQ ID NO: 25935 - RNA, 20 nt, Artificial Sequence
  HTT spacer sequence GTCN PAM
gguuuaagacuuuaucugca

SEQ ID NO: 25936 - RNA, 20 nt, Artificial Sequence
  HTT spacer sequence GTCN PAM
uaaaccagacaaaacauaua

SEQ ID NO: 25937 - RNA, 20 nt, Artificial Sequence
  HTT spacer sequence GTCN PAM
cuacaaaaagaaaaacaaaa

SEQ ID NO: 25938 - RNA, 20 nt, Artificial Sequence
  HTT spacer sequence GTCN PAM
guggucccagcuacucgggg

SEQ ID NO: 25939 - RNA, 20 nt, Artificial Sequence
  HTT spacer sequence GTCN PAM
cagcuacucggggcugaggu

SEQ ID NO: 25940 - RNA, 20 nt, Artificial Sequence
  HTT spacer sequence GTCN PAM
cccaugcuggagugcaaugg

SEQ ID NO: 25941 - RNA, 20 nt, Artificial Sequence
  HTT spacer sequence GTCN PAM
gucacccaugcuggagugca

SEQ ID NO: 25942 - RNA, 20 nt, Artificial Sequence
  HTT spacer sequence GTCN PAM
guuuugggugauuugauaau

SEQ ID NO: 25943 - RNA, 20 nt, Artificial Sequence
  HTT spacer sequence GTCN PAM
guggcuucauaguauuuuua

SEQ ID NO: 25944 - RNA, 20 nt, Artificial Sequence
  HTT spacer sequence GTCN PAM
caaaaaaaaaaaaaagaaag

SEQ ID NO: 25945 - RNA, 20 nt, Artificial Sequence
  HTT spacer sequence GTCN PAM
cgcucugucgccugcguugg

SEQ ID NO: 25946 - RNA, 20 nt, Artificial Sequence
  HTT spacer sequence GTCN PAM
ccugcguuggagugcaguga

SEQ ID NO: 25947 - RNA, 20 nt, Artificial Sequence
  HTT spacer sequence GTCN PAM
cugcacuccaacgcaggcga

SEQ ID NO: 25948 - RNA, 20 nt, Artificial Sequence
  HTT spacer sequence GTCN PAM
cagcuacucaggaggcugag

SEQ ID NO: 25949 - RNA, 20 nt, Artificial Sequence
  HTT spacer sequence GTCN PAM
cuacuaaaaauacaaaaaau

SEQ ID NO: 25950 - RNA, 20 nt, Artificial Sequence
  HTT spacer sequence GTCN PAM
caaucuccugaccucgugau

SEQ ID NO: 25951 - RNA, 20 nt, Artificial Sequence
  HTT spacer sequence GTCN PAM
ggagauugagaccauccugg

SEQ ID NO: 25952 - RNA, 20 nt, Artificial Sequence
  HTT spacer sequence GTCN PAM
cauagcuuacugaugcucuu

SEQ ID NO: 25953 - RNA, 20 nt, Artificial Sequence
  HTT spacer sequence GTCN PAM
acucuguuguuaaucuguua

SEQ ID NO: 25954 - RNA, 20 nt, Artificial Sequence
  HTT spacer sequence GTCN PAM
agcguauuuuuuuuuuuguu

SEQ ID NO: 25955 - RNA, 20 nt, Artificial Sequence
  HTT spacer sequence GTCN PAM
cacucuguugcccaggcugg

SEQ ID NO: 25956 - RNA, 20 nt, Artificial Sequence
  HTT spacer sequence GTCN PAM
cagcuacucgggaggcugag

SEQ ID NO: 25957 - RNA, 20 nt, Artificial Sequence
  HTT spacer sequence GTCN PAM
ggaguucaaggccaguuugg

SEQ ID NO: 25958 - RNA, 20 nt, Artificial Sequence
  HTT spacer sequence GTCN PAM
cccaaaguguugggauuaua

SEQ ID NO: 25959 - RNA, 20 nt, Artificial Sequence
  HTT spacer sequence GTCN PAM
ggccccuguucaguguauau

SEQ ID NO: 25960 - RNA, 20 nt, Artificial Sequence
  HTT spacer sequence GTCN PAM
uuuaaaaaugucucccugug

SEQ ID NO: 25961 - RNA, 20 nt, Artificial Sequence
  HTT spacer sequence GTCN PAM
cccuguguuucuguuuagcu

SEQ ID NO: 25962 - RNA, 20 nt, Artificial Sequence
  HTT spacer sequence GTCN PAM
ugcuuuauaauuugucagau

SEQ ID NO: 25963 - RNA, 20 nt, Artificial Sequence
  HTT spacer sequence GTCN PAM
gauggguuggagcagugcuu

SEQ ID NO: 25964 - RNA, 20 nt, Artificial Sequence
  HTT spacer sequence GTCN PAM
uaaacuaagcacugcuccaa

SEQ ID NO: 25965 - RNA, 20 nt, Artificial Sequence
  HTT spacer sequence GTCN PAM
aaaaaaaaaauuaguccuaa

SEQ ID NO: 25966 - RNA, 20 nt, Artificial Sequence
  HTT spacer sequence GTCN PAM
ugccuccuaagcaugguacc

SEQ ID NO: 25967 - RNA, 20 nt, Artificial Sequence
  HTT spacer sequence GTCN PAM
gccugcugagaacagugacu

SEQ ID NO: 25968 - RNA, 20 nt, Artificial Sequence
  HTT spacer sequence GTCN PAM
cuguucucagcaggcggacu

SEQ ID NO: 25969 - RNA, 20 nt, Artificial Sequence
  HTT spacer sequence GTCN PAM
cucucgaguacucagcagag

SEQ ID NO: 25970 - RNA, 20 nt, Artificial Sequence
  HTT spacer sequence GTCN PAM
uguuuucucuucucuggugc

SEQ ID NO: 25971 - RNA, 20 nt, Artificial Sequence
  HTT spacer sequence GTCN PAM
uaugaacuguggcugucuug

SEQ ID NO: 25972 - RNA, 20 nt, Artificial Sequence
  HTT spacer sequence GTCN PAM
uggucuccuuagauucucag

SEQ ID NO: 25973 - RNA, 20 nt, Artificial Sequence
  HTT spacer sequence GTCN PAM
ccuuagauucucagcaccuc

SEQ ID NO: 25974 - RNA, 20 nt, Artificial Sequence
  HTT spacer sequence GTCN PAM
cuccuccuugugccacagcc

SEQ ID NO: 25975 - RNA, 20 nt, Artificial Sequence
  HTT spacer sequence GTCN PAM
gcccuauggcugccccaacu

SEQ ID NO: 25976 - RNA, 20 nt, Artificial Sequence
  HTT spacer sequence GTCN PAM
cucgucucccagggaucacu

SEQ ID NO: 25977 - RNA, 20 nt, Artificial Sequence
  HTT spacer sequence GTCN PAM
cccagggaucacuguccuuc

SEQ ID NO: 25978 - RNA, 20 nt, Artificial Sequence
  HTT spacer sequence GTCN PAM
uucauugcucauguccagug

SEQ ID NO: 25979 - RNA, 20 nt, Artificial Sequence
  HTT spacer sequence GTCN PAM
agugucuugaggacucuggg

SEQ ID NO: 25980 - RNA, 20 nt, Artificial Sequence
  HTT spacer sequence GTCN PAM
ugaggacucuggguuuuguc

SEQ ID NO: 25981 - RNA, 20 nt, Artificial Sequence
  HTT spacer sequence GTCN PAM
ucaagacacuggacaugagc

SEQ ID NO: 25982 - RNA, 20 nt, Artificial Sequence
  HTT spacer sequence GTCN PAM
guuuuguuuuuugguuugcu

SEQ ID NO: 25983 - RNA, 20 nt, Artificial Sequence
  HTT spacer sequence GTCN PAM
caggcaggaggguaaaccca

SEQ ID NO: 25984 - RNA, 20 nt, Artificial Sequence
  HTT spacer sequence GTCN PAM
cucacccucauugugcucag

SEQ ID NO: 25985 - RNA, 20 nt, Artificial Sequence
  HTT spacer sequence GTCN PAM
cacucuauuacauuagauau

SEQ ID NO: 25986 - RNA, 20 nt, Artificial Sequence
  HTT spacer sequence GTCN PAM
uuuguuagacaaguagugau

SEQ ID NO: 25987 - RNA, 20 nt, Artificial Sequence
  HTT spacer sequence GTCN PAM
aacaaaggacuuuaacaaau

SEQ ID NO: 25988 - RNA, 20 nt, Artificial Sequence
  HTT spacer sequence GTCN PAM
cacaccacuuuuuguuuuua

SEQ ID NO: 25989 - RNA, 20 nt, Artificial Sequence
  HTT spacer sequence GTCN PAM
gaauugaauuugucacacac

SEQ ID NO: 25990 - RNA, 20 nt, Artificial Sequence
  HTT spacer sequence GTCN PAM
aauugguguuggcuuuuagc

SEQ ID NO: 25991 - RNA, 20 nt, Artificial Sequence
  HTT spacer sequence GTCN PAM
aucucaaaaaaaaaaaaaaa

SEQ ID NO: 25992 - RNA, 20 nt, Artificial Sequence
  HTT spacer sequence GTCN PAM
ggcuggucuugaacuccuga

SEQ ID NO: 25993 - RNA, 20 nt, Artificial Sequence
  HTT spacer sequence GTCN PAM
ugaacuccugaccucaagug

SEQ ID NO: 25994 - RNA, 20 nt, Artificial Sequence
  HTT spacer sequence GTCN PAM
ggaguucaagaccagccuga

SEQ ID NO: 25995 - RNA, 20 nt, Artificial Sequence
  HTT spacer sequence GTCN PAM
uuuucaagaaucaagaaggg

SEQ ID NO: 25996 - RNA, 20 nt, Artificial Sequence
  HTT spacer sequence GTCN PAM
uuuuugcagauuauuuuaag

SEQ ID NO: 25997 - RNA, 20 nt, Artificial Sequence
  HTT spacer sequence GTCN PAM
uaaaauaaucugcaaaaaug

SEQ ID NO: 25998 - RNA, 20 nt, Artificial Sequence
  HTT spacer sequence GTCN PAM
uagaauugucuuaaaauaau

SEQ ID NO: 25999 - RNA, 20 nt, Artificial Sequence
  HTT spacer sequence GTCN PAM
uguucgcagggcaggaauuc

SEQ ID NO: 26000 - RNA, 20 nt, Artificial Sequence
  HTT spacer sequence GTCN PAM
auuagguauccaguccuguu

SEQ ID NO: 26001 - RNA, 20 nt, Artificial Sequence
  HTT spacer sequence GTCN PAM
ugaaauccaaguuauauaca

SEQ ID NO: 26002 - RNA, 20 nt, Artificial Sequence
  HTT spacer sequence GTCN PAM
guaaaaagucuugaaaucca

SEQ ID NO: 26003 - RNA, 20 nt, Artificial Sequence
  HTT spacer sequence GTCN PAM
aggauucguacaauaacggg

SEQ ID NO: 26004 - RNA, 20 nt, Artificial Sequence
  HTT spacer sequence GTCN PAM
ucucugagucgcuuaauguc

SEQ ID NO: 26005 - RNA, 20 nt, Artificial Sequence
  HTT spacer sequence GTCN PAM
cuuaaugucucacuugucuu

SEQ ID NO: 26006 - RNA, 20 nt, Artificial Sequence
  HTT spacer sequence GTCN PAM
cacuugucuuucuacagugu

SEQ ID NO: 26007 - RNA, 20 nt, Artificial Sequence
  HTT spacer sequence GTCN PAM
uucuacaguguguugaagag

SEQ ID NO: 26008 - RNA, 20 nt, Artificial Sequence
  HTT spacer sequence GTCN PAM
agaaccaaugauggcaacug

SEQ ID NO: 26009 - RNA, 20 nt, Artificial Sequence
  HTT spacer sequence GTCN PAM
uaacagaagaggaaaagaau

SEQ ID NO: 26010 - RNA, 20 nt, Artificial Sequence
  HTT spacer sequence GTCN PAM
uacccgaacgucuuaacaga

SEQ ID NO: 26011 - RNA, 20 nt, Artificial Sequence
  HTT spacer sequence GTCN PAM
agcgcagcacuuuuuggcuc

SEQ ID NO: 26012 - RNA, 20 nt, Artificial Sequence
  HTT spacer sequence GTCN PAM
augauugagccaagaggcca

SEQ ID NO: 26013 - RNA, 20 nt, Artificial Sequence
  HTT spacer sequence GTCN PAM
uccuggggagugaagggaag

SEQ ID NO: 26014 - RNA, 20 nt, Artificial Sequence
  HTT spacer sequence GTCN PAM
gucacuguggagggcagagg

SEQ ID NO: 26015 - RNA, 20 nt, Artificial Sequence
  HTT spacer sequence GTCN PAM
cuguggagggcagaggacac

SEQ ID NO: 26016 - RNA, 20 nt, Artificial Sequence
  HTT spacer sequence GTCN PAM
ucugcccuccacagugacag

SEQ ID NO: 26017 - RNA, 20 nt, Artificial Sequence
  HTT spacer sequence GTCN PAM
cucggaguuucuguuuagaa

SEQ ID NO: 26018 - RNA, 20 nt, Artificial Sequence
  HTT spacer sequence GTCN PAM
uugcuaacauauccaguuau

SEQ ID NO: 26019 - RNA, 20 nt, Artificial Sequence
  HTT spacer sequence GTCN PAM
ucaacaacuacagugaaaaa

SEQ ID NO: 26020 - RNA, 20 nt, Artificial Sequence
  HTT spacer sequence GTCN PAM
caaggccgagcacagcgccu

SEQ ID NO: 26021 - RNA, 20 nt, Artificial Sequence
  HTT spacer sequence GTCN PAM
gcgagggccugggugaagug

SEQ ID NO: 26022 - RNA, 20 nt, Artificial Sequence
  HTT spacer sequence GTCN PAM
uucuccugcuccgccugcac

SEQ ID NO: 26023 - RNA, 20 nt, Artificial Sequence
  HTT spacer sequence GTCN PAM
uugguggaagcacgaaagag

SEQ ID NO: 26024 - RNA, 20 nt, Artificial Sequence
  HTT spacer sequence GTCN PAM
gcuguauucagagaacucua

SEQ ID NO: 26025 - RNA, 20 nt, Artificial Sequence
  HTT spacer sequence GTCN PAM
caagcccaucucacucacug

SEQ ID NO: 26026 - RNA, 20 nt, Artificial Sequence
  HTT spacer sequence GTCN PAM
gcaaaccagaaugcaguuca

SEQ ID NO: 26027 - RNA, 20 nt, Artificial Sequence
  HTT spacer sequence GTCN PAM
ccacccauucaaagcacagg

SEQ ID NO: 26028 - RNA, 20 nt, Artificial Sequence
  HTT spacer sequence GTCN PAM
ugugcuuugaaugggugggg

SEQ ID NO: 26029 - RNA, 20 nt, Artificial Sequence
  HTT spacer sequence GTCN PAM
gcuuuaugacuagaagucuc

SEQ ID NO: 26030 - RNA, 20 nt, Artificial Sequence
  HTT spacer sequence GTCN PAM
uaaagcugacaaaacacaag

SEQ ID NO: 26031 - RNA, 20 nt, Artificial Sequence
  HTT spacer sequence GTCN PAM
cuuuucacuuaaauuuguuu

SEQ ID NO: 26032 - RNA, 20 nt, Artificial Sequence
  HTT spacer sequence GTCN PAM
caaaaaaaaaaaaaacaaau

SEQ ID NO: 26033 - RNA, 20 nt, Artificial Sequence
  HTT spacer sequence GTCN PAM
ugcucugucgcccaggcugg

SEQ ID NO: 26034 - RNA, 20 nt, Artificial Sequence
  HTT spacer sequence GTCN PAM
cccaggcuggagugcagugg

SEQ ID NO: 26035 - RNA, 20 nt, Artificial Sequence
  HTT spacer sequence GTCN PAM
cagcuacucgggaggcugag

SEQ ID NO: 26036 - RNA, 20 nt, Artificial Sequence
  HTT spacer sequence GTCN PAM
cuacuaaaaauacaaaaaaa

SEQ ID NO: 26037 - RNA, 20 nt, Artificial Sequence
  HTT spacer sequence GTCN PAM
cgaucuccugaccucgugau

SEQ ID NO: 26038 - RNA, 20 nt, Artificial Sequence
  HTT spacer sequence GTCN PAM
ggagaucgagaccauccugg

SEQ ID NO: 26039 - RNA, 20 nt, Artificial Sequence
  HTT spacer sequence GTCN PAM
cggccucccaaagugcuggg

SEQ ID NO: 26040 - RNA, 20 nt, Artificial Sequence
  HTT spacer sequence GTCN PAM
uguauacuaggcauuaaaaa

SEQ ID NO: 26041 - RNA, 20 nt, Artificial Sequence
  HTT spacer sequence GTCN PAM
ggagucaaggaaaauaccca

SEQ ID NO: 26042 - RNA, 20 nt, Artificial Sequence
  HTT spacer sequence GTCN PAM
aggaaaauacccauguucca

SEQ ID NO: 26043 - RNA, 20 nt, Artificial Sequence
  HTT spacer sequence GTCN PAM
guuucaaugcuuucuguaac

SEQ ID NO: 26044 - RNA, 20 nt, Artificial Sequence
  HTT spacer sequence GTCN PAM
uccaaaaaaaucauguaauu

SEQ ID NO: 26045 - RNA, 20 nt, Artificial Sequence
  HTT spacer sequence GTCN PAM
uuuaaaagaucaguaauuua

SEQ ID NO: 26046 - RNA, 20 nt, Artificial Sequence
  HTT spacer sequence GTCN PAM
uaagugagauuugagagaaa

SEQ ID NO: 26047 - RNA, 20 nt, Artificial Sequence
  HTT spacer sequence GTCN PAM
guuuccuguagcagaaaaaa

SEQ ID NO: 26048 - RNA, 20 nt, Artificial Sequence
  HTT spacer sequence GTCN PAM
gagcuuuuuucugcuacagg

SEQ ID NO: 26049 - RNA, 20 nt, Artificial Sequence
  HTT spacer sequence GTCN PAM
ccucacucgcagaaggcuac

SEQ ID NO: 26050 - RNA, 20 nt, Artificial Sequence
  HTT spacer sequence GTCN PAM
ggcagcuguaaacucuaaau

SEQ ID NO: 26051 - RNA, 20 nt, Artificial Sequence
  HTT spacer sequence GTCN PAM
uuaucugaagagggcgaugc

SEQ ID NO: 26052 - RNA, 20 nt, Artificial Sequence
  HTT spacer sequence GTCN PAM
gauugagaaacaacuugaaa

SEQ ID NO: 26053 - RNA, 20 nt, Artificial Sequence
  HTT spacer sequence GTCN PAM
uccagaaagugucuacccag

SEQ ID NO: 26054 - RNA, 20 nt, Artificial Sequence
  HTT spacer sequence GTCN PAM
acccaguugaagacaaaccu

SEQ ID NO: 26055 - RNA, 20 nt, Artificial Sequence
  HTT spacer sequence GTCN PAM
ucaacuggguagacacuuuc

SEQ ID NO: 26056 - RNA, 20 nt, Artificial Sequence
  HTT spacer sequence GTCN PAM
caaagaaccgugcagauaag

SEQ ID NO: 26057 - RNA, 20 nt, Artificial Sequence
  HTT spacer sequence GTCN PAM
gugcuagagaggaaacugga

SEQ ID NO: 26058 - RNA, 20 nt, Artificial Sequence
  HTT spacer sequence GTCN PAM
cagcuccaguuuccucucua

SEQ ID NO: 26059 - RNA, 20 nt, Artificial Sequence
  HTT spacer sequence GTCN PAM
uguacuguuuuaaagcuuuu

SEQ ID NO: 26060 - RNA, 20 nt, Artificial Sequence
  HTT spacer sequence GTCN PAM
ucuggauucagaucagguuu

SEQ ID NO: 26061 - RNA, 20 nt, Artificial Sequence
  HTT spacer sequence GTCN PAM
cuuuuaucuuucauccauca

SEQ ID NO: 26062 - RNA, 20 nt, Artificial Sequence
  HTT spacer sequence GTCN PAM
uuuaggguaauuuguacuaa

SEQ ID NO: 26063 - RNA, 20 nt, Artificial Sequence
  HTT spacer sequence GTCN PAM
gcauguuucccucaucaguu

SEQ ID NO: 26064 - RNA, 20 nt, Artificial Sequence
  HTT spacer sequence GTCN PAM
gcauccuugccccagcuccc

SEQ ID NO: 26065 - RNA, 20 nt, Artificial Sequence
  HTT spacer sequence GTCN PAM
agggagcuggggcaaggaug

SEQ ID NO: 26066 - RNA, 20 nt, Artificial Sequence
  HTT spacer sequence GTCN PAM
cauccacuugccuccccucc

SEQ ID NO: 26067 - RNA, 20 nt, Artificial Sequence
  HTT spacer sequence GTCN PAM
ugcuaaauuccauuccuuuu

SEQ ID NO: 26068 - RNA, 20 nt, Artificial Sequence
  HTT spacer sequence GTCN PAM
caguuacuguccugcuaaau

SEQ ID NO: 26069 - RNA, 20 nt, Artificial Sequence
  HTT spacer sequence GTCN PAM
augugggagcuguguggcuc

SEQ ID NO: 26070 - RNA, 20 nt, Artificial Sequence
  HTT spacer sequence GTCN PAM
agaggggaagcgugcaaaug

SEQ ID NO: 26071 - RNA, 20 nt, Artificial Sequence
  HTT spacer sequence GTCN PAM
ugucccuucaugaugcacau

SEQ ID NO: 26072 - RNA, 20 nt, Artificial Sequence
  HTT spacer sequence GTCN PAM
cuucaugaugcacauuuucc

SEQ ID NO: 26073 - RNA, 20 nt, Artificial Sequence
  HTT spacer sequence GTCN PAM
caguuaaaucacugcagaug

SEQ ID NO: 26074 - RNA, 20 nt, Artificial Sequence
  HTT spacer sequence GTCN PAM
aaauuuaacugucauuuuug

SEQ ID NO: 26075 - RNA, 20 nt, Artificial Sequence
  HTT spacer sequence GTCN PAM
uuuuugagccgugaucuugg

SEQ ID NO: 26076 - RNA, 20 nt, Artificial Sequence
  HTT spacer sequence GTCN PAM
agaaggaaauagagaagugu

SEQ ID NO: 26077 - RNA, 20 nt, Artificial Sequence
  HTT spacer sequence GTCN PAM
gcacuguuacucaccugaaa

SEQ ID NO: 26078 - RNA, 20 nt, Artificial Sequence
  HTT spacer sequence GTCN PAM
guuucccuaggagaacugag

SEQ ID NO: 26079 - RNA, 20 nt, Artificial Sequence
  HTT spacer sequence GTCN PAM
acacugauuuuccacagugg

SEQ ID NO: 26080 - RNA, 20 nt, Artificial Sequence
  HTT spacer sequence GTCN PAM
cgcucugucacccaggcugg

SEQ ID NO: 26081 - RNA, 20 nt, Artificial Sequence
  HTT spacer sequence GTCN PAM
cccaggcuggagugcagggg

SEQ ID NO: 26082 - RNA, 20 nt, Artificial Sequence
  HTT spacer sequence GTCN PAM
cagcuacucgggaggcugag

SEQ ID NO: 26083 - RNA, 20 nt, Artificial Sequence
  HTT spacer sequence GTCN PAM
cuacuaaaaauacaaaaaau

SEQ ID NO: 26084 - RNA, 20 nt, Artificial Sequence
  HTT spacer sequence GTCN PAM
ccaucuccugaccucgugau

SEQ ID NO: 26085 - RNA, 20 nt, Artificial Sequence
  HTT spacer sequence GTCN PAM
ggagauggagaccauccugg

SEQ ID NO: 26086 - RNA, 20 nt, Artificial Sequence
  HTT spacer sequence GTCN PAM
ucccagcacuuugggaggcc

SEQ ID NO: 26087 - RNA, 20 nt, Artificial Sequence
  HTT spacer sequence GTCN PAM
gcuuuuaaugaaggaggcau

SEQ ID NO: 26088 - RNA, 20 nt, Artificial Sequence
  HTT spacer sequence GTCN PAM
gaagaaaauccgucuaaaug

SEQ ID NO: 26089 - RNA, 20 nt, Artificial Sequence
  HTT spacer sequence GTCN PAM
aaaugggccauugcucuccu

SEQ ID NO: 26090 - RNA, 20 nt, Artificial Sequence
  HTT spacer sequence GTCN PAM
uugggaacuucuuuuccuuu

SEQ ID NO: 26091 - RNA, 20 nt, Artificial Sequence
  HTT spacer sequence GTCN PAM
aaggaaaggaaaagaaguuc

SEQ ID NO: 26092 - RNA, 20 nt, Artificial Sequence
  HTT spacer sequence GTCN PAM
gccuccuagugucaaaggaa

SEQ ID NO: 26093 - RNA, 20 nt, Artificial Sequence
  HTT spacer sequence GTCN PAM
auggcugugggcagcagggg

SEQ ID NO: 26094 - RNA, 20 nt, Artificial Sequence
  HTT spacer sequence GTCN PAM
uuguucuuacuagaauggaa

SEQ ID NO: 26095 - RNA, 20 nt, Artificial Sequence
  HTT spacer sequence GTCN PAM
ccuuucucccaguucuuaag

SEQ ID NO: 26096 - RNA, 20 nt, Artificial Sequence
  HTT spacer sequence GTCN PAM
cuguacugaaucuuaagaac

SEQ ID NO: 26097 - RNA, 20 nt, Artificial Sequence
  HTT spacer sequence GTCN PAM
guucuaguguucuauucuug

SEQ ID NO: 26098 - RNA, 20 nt, Artificial Sequence
  HTT spacer sequence GTCN PAM
gguugggaaagcugacagcu

SEQ ID NO: 26099 - RNA, 20 nt, Artificial Sequence
  HTT spacer sequence GTCN PAM
gcuuucccaaccugacgggg

SEQ ID NO: 26100 - RNA, 20 nt, Artificial Sequence
  HTT spacer sequence GTCN PAM
cacuguauucccugcagcug

SEQ ID NO: 26101 - RNA, 20 nt, Artificial Sequence
  HTT spacer sequence GTCN PAM
ccucucagaugguuggggga

SEQ ID NO: 26102 - RNA, 20 nt, Artificial Sequence
  HTT spacer sequence GTCN PAM
cccaaccaucugagaggcga

SEQ ID NO: 26103 - RNA, 20 nt, Artificial Sequence
  HTT spacer sequence GTCN PAM
acuccuuuggguaucuuauu

SEQ ID NO: 26104 - RNA, 20 nt, Artificial Sequence
  HTT spacer sequence GTCN PAM
accuucgucccccaaccauc

SEQ ID NO: 26105 - RNA, 20 nt, Artificial Sequence
  HTT spacer sequence GTCN PAM
ccaagguguaauuuugggua

SEQ ID NO: 26106 - RNA, 20 nt, Artificial Sequence
  HTT spacer sequence GTCN PAM
gaugucucuuggaauuuauu

SEQ ID NO: 26107 - RNA, 20 nt, Artificial Sequence
  HTT spacer sequence GTCN PAM
cuuggaauuuauuauuuguu

SEQ ID NO: 26108 - RNA, 20 nt, Artificial Sequence
  HTT spacer sequence GTCN PAM
aauuuaucagcugucaagaa

SEQ ID NO: 26109 - RNA, 20 nt, Artificial Sequence
  HTT spacer sequence GTCN PAM
agaauuuuauuuaaaauuua

SEQ ID NO: 26110 - RNA, 20 nt, Artificial Sequence
  HTT spacer sequence GTCN PAM
gauuuccauuuaaagaaaac

SEQ ID NO: 26111 - RNA, 20 nt, Artificial Sequence
  HTT spacer sequence GTCN PAM
ugagauauacauuaauuuuu

SEQ ID NO: 26112 - RNA, 20 nt, Artificial Sequence
  HTT spacer sequence GTCN PAM
guauucauugcacauuucaa

SEQ ID NO: 26113 - RNA, 20 nt, Artificial Sequence
  HTT spacer sequence GTCN PAM
acacaauuaaaugcuuugaa

SEQ ID NO: 26114 - RNA, 20 nt, Artificial Sequence
  HTT spacer sequence GTCN PAM
uuaguaauuauuaugcauuu

SEQ ID NO: 26115 - RNA, 20 nt, Artificial Sequence
  HTT spacer sequence GTCN PAM
auuacagguuuauaauuauu

SEQ ID NO: 26116 - RNA, 20 nt, Artificial Sequence
  HTT spacer sequence GTCN PAM
ggaaacauaguguuuauucu

SEQ ID NO: 26117 - RNA, 20 nt, Artificial Sequence
  HTT spacer sequence GTCN PAM
uguaauuagaauaaacacua

SEQ ID NO: 26118 - RNA, 20 nt, Artificial Sequence
  HTT spacer sequence GTCN PAM
ggugccuucuaccugcugcc

SEQ ID NO: 26119 - RNA, 20 nt, Artificial Sequence
  HTT spacer sequence GTCN PAM
cugcucugcgcgagggcaca

SEQ ID NO: 26120 - RNA, 20 nt, Artificial Sequence
  HTT spacer sequence GTCN PAM
gugaucuacucuaaccccac

SEQ ID NO: 26121 - RNA, 20 nt, Artificial Sequence
  HTT spacer sequence GTCN PAM
agguugaaucaugaauuauu

SEQ ID NO: 26122 - RNA, 20 nt, Artificial Sequence
  HTT spacer sequence GTCN PAM
aaauggauguuuuuguuuuu

SEQ ID NO: 26123 - RNA, 20 nt, Artificial Sequence
  HTT spacer sequence GTCN PAM
cagccuuccuuccacuggcc

SEQ ID NO: 26124 - RNA, 20 nt, Artificial Sequence
  HTT spacer sequence GTCN PAM
cguuaccaugugucacagcc

SEQ ID NO: 26125 - RNA, 20 nt, Artificial Sequence
  HTT spacer sequence GTCN PAM
ucuucggugucgugaugugc

SEQ ID NO: 26126 - RNA, 20 nt, Artificial Sequence
  HTT spacer sequence GTCN PAM
ucggugucgugaugugcuug

SEQ ID NO: 26127 - RNA, 20 nt, Artificial Sequence
  HTT spacer sequence GTCN PAM
ugaugugcuuggcaguguuc

SEQ ID NO: 26128 - RNA, 20 nt, Artificial Sequence
  HTT spacer sequence GTCN PAM
guggcagccaugugcuucuc

SEQ ID NO: 26129 - RNA, 20 nt, Artificial Sequence
  HTT spacer sequence GTCN PAM
guguaugugaagguacuggu

SEQ ID NO: 26130 - RNA, 20 nt, Artificial Sequence
  HTT spacer sequence GTCN PAM
cuaaccaguaccuucacaua

SEQ ID NO: 26131 - RNA, 20 nt, Artificial Sequence
  HTT spacer sequence GTCN PAM
aacuauaucuccaauaccac

SEQ ID NO: 26132 - RNA, 20 nt, Artificial Sequence
  HTT spacer sequence GTCN PAM
auagggcaaugcuggaagau

SEQ ID NO: 26133 - RNA, 20 nt, Artificial Sequence
  HTT spacer sequence GTCN PAM
gggaggggucaauagggcaa

SEQ ID NO: 26134 - RNA, 20 nt, Artificial Sequence
  HTT spacer sequence GTCN PAM
aaguucaaaagccuacagau

SEQ ID NO: 26135 - RNA, 20 nt, Artificial Sequence
  HTT spacer sequence GTCN PAM
cugucaaaguucaaaagccu

SEQ ID NO: 26136 - RNA, 20 nt, Artificial Sequence
  HTT spacer sequence GTCN PAM
uaggaugugucccugucaaa

SEQ ID NO: 26137 - RNA, 20 nt, Artificial Sequence
  HTT spacer sequence GTCN PAM
uuucgacucagcgugugugc

SEQ ID NO: 26138 - RNA, 20 nt, Artificial Sequence
  HTT spacer sequence GTCN PAM
aaaagacucuaaguaguagu

SEQ ID NO: 26139 - RNA, 20 nt, Artificial Sequence
  HTT spacer sequence GTCN PAM
gccaaggcccugccucgcaa

SEQ ID NO: 26140 - RNA, 20 nt, Artificial Sequence
  HTT spacer sequence GTCN PAM
aggaaaccaaacaccuaugc

SEQ ID NO: 26141 - RNA, 20 nt, Artificial Sequence
  HTT spacer sequence GTCN PAM
uuggacagaaaaucaguagg

SEQ ID NO: 26142 - RNA, 20 nt, Artificial Sequence
  HTT spacer sequence GTCN PAM
aaagacccuccaaguccagg

SEQ ID NO: 26143 - RNA, 20 nt, Artificial Sequence
  HTT spacer sequence GTCN PAM
ucugugagagggucagagag

SEQ ID NO: 26144 - RNA, 20 nt, Artificial Sequence
  HTT spacer sequence GTCN PAM
gagaguauacccaugcgugc

SEQ ID NO: 26145 - RNA, 20 nt, Artificial Sequence
  HTT spacer sequence GTCN PAM
gugaguauuccugugugugc

SEQ ID NO: 26146 - RNA, 20 nt, Artificial Sequence
  HTT spacer sequence GTCN PAM
cagggccggagagaguaugu

SEQ ID NO: 26147 - RNA, 20 nt, Artificial Sequence
  HTT spacer sequence GTCN PAM
cugagaggucagaguguuug

SEQ ID NO: 26148 - RNA, 20 nt, Artificial Sequence
  HTT spacer sequence GTCN PAM
gaguguuuguguguguguca

SEQ ID NO: 26149 - RNA, 20 nt, Artificial Sequence
  HTT spacer sequence GTCN PAM
aagaggguugcauugugccc

SEQ ID NO: 26150 - RNA, 20 nt, Artificial Sequence
  HTT spacer sequence GTCN PAM
gagggugccucgcgugugug

SEQ ID NO: 26151 - RNA, 20 nt, Artificial Sequence
  HTT spacer sequence GTCN PAM
cugaggggucagagugugcc

SEQ ID NO: 26152 - RNA, 20 nt, Artificial Sequence
  HTT spacer sequence GTCN PAM
gagugugccugugugugugc

SEQ ID NO: 26153 - RNA, 20 nt, Artificial Sequence
  HTT spacer sequence GTCN PAM
cugaggggucagagugugcc

SEQ ID NO: 26154 - RNA, 20 nt, Artificial Sequence
  HTT spacer sequence GTCN PAM
gagugugccucugugugugu

SEQ ID NO: 26155 - RNA, 20 nt, Artificial Sequence
  HTT spacer sequence GTCN PAM
cugaggggucagagugugcc

SEQ ID NO: 26156 - RNA, 20 nt, Artificial Sequence
  HTT spacer sequence GTCN PAM
gagugugccucugugugugc

SEQ ID NO: 26157 - RNA, 20 nt, Artificial Sequence
  HTT spacer sequence GTCN PAM
cugagggggucagagugugc

SEQ ID NO: 26158 - RNA, 20 nt, Artificial Sequence
  HTT spacer sequence GTCN PAM
gagugugccucugugugugu

SEQ ID NO: 26159 - RNA, 20 nt, Artificial Sequence
  HTT spacer sequence GTCN PAM
cugagggggucagagugugc

SEQ ID NO: 26160 - RNA, 20 nt, Artificial Sequence
  HTT spacer sequence GTCN PAM
gagugugccucugugugugu

SEQ ID NO: 26161 - RNA, 20 nt, Artificial Sequence
  HTT spacer sequence GTCN PAM
cugaggggucaguguuccua

SEQ ID NO: 26162 - RNA, 20 nt, Artificial Sequence
  HTT spacer sequence GTCN PAM
guguuccuaugugcucauga

SEQ ID NO: 26163 - RNA, 20 nt, Artificial Sequence
  HTT spacer sequence GTCN PAM
ugagcacauaggaacacuga

SEQ ID NO: 26164 - RNA, 20 nt, Artificial Sequence
  HTT spacer sequence GTCN PAM
gagugugccugugugccaau

SEQ ID NO: 26165 - RNA, 20 nt, Artificial Sequence
  HTT spacer sequence GTCN PAM
uaguagaccaguuaauuuau

SEQ ID NO: 26166 - RNA, 20 nt, Artificial Sequence
  HTT spacer sequence GTCN PAM
acuaugaccacauauaaaaa

SEQ ID NO: 26167 - RNA, 20 nt, Artificial Sequence
  HTT spacer sequence GTCN PAM
aaauaaauuaacuggucuac

SEQ ID NO: 26168 - RNA, 20 nt, Artificial Sequence
  HTT spacer sequence GTCN PAM
aacacaggagucaaaauaaa

SEQ ID NO: 26169 - RNA, 20 nt, Artificial Sequence
  HTT spacer sequence GTCN PAM
uauuuuggucuaacacagga

SEQ ID NO: 26170 - RNA, 20 nt, Artificial Sequence
  HTT spacer sequence GTCN PAM
cuuaucuaucuaaugacaga

SEQ ID NO: 26171 - RNA, 20 nt, Artificial Sequence
  HTT spacer sequence GTCN PAM
uuagauagauaagggacuuu

SEQ ID NO: 26172 - RNA, 20 nt, Artificial Sequence
  HTT spacer sequence GTCN PAM
aagccacuggauuauuaugc

SEQ ID NO: 26173 - RNA, 20 nt, Artificial Sequence
  HTT spacer sequence GTCN PAM
uuauugucuuuucagaugaa

SEQ ID NO: 26174 - RNA, 20 nt, Artificial Sequence
  HTT spacer sequence GTCN PAM
uuucagaugaaucaaguaga

SEQ ID NO: 26175 - RNA, 20 nt, Artificial Sequence
  HTT spacer sequence GTCN PAM
caagaauaaucuacuugauu

SEQ ID NO: 26176 - RNA, 20 nt, Artificial Sequence
  HTT spacer sequence GTCN PAM
auuugaaaaugauaaaacuu

SEQ ID NO: 26177 - RNA, 20 nt, Artificial Sequence
  HTT spacer sequence GTCN PAM
ccuuuuuucagaaguggugu

SEQ ID NO: 26178 - RNA, 20 nt, Artificial Sequence
  HTT spacer sequence GTCN PAM
ucacaaaaugaucaguguuc

SEQ ID NO: 26179 - RNA, 20 nt, Artificial Sequence
  HTT spacer sequence GTCN PAM
aagcucuuccucugaacacu

SEQ ID NO: 26180 - RNA, 20 nt, Artificial Sequence
  HTT spacer sequence GTCN PAM
ccacagccauaccggcucug

SEQ ID NO: 26181 - RNA, 20 nt, Artificial Sequence
  HTT spacer sequence GTCN PAM
acgaccucuuuguauuaaga

SEQ ID NO: 26182 - RNA, 20 nt, Artificial Sequence
  HTT spacer sequence GTCN PAM
uggacuaugggcugcagagc

SEQ ID NO: 26183 - RNA, 20 nt, Artificial Sequence
  HTT spacer sequence GTCN PAM
auguuacugagacucaucca

SEQ ID NO: 26184 - RNA, 20 nt, Artificial Sequence
  HTT spacer sequence GTCN PAM
caguaacauugacaccacca

SEQ ID NO: 26185 - RNA, 20 nt, Artificial Sequence
  HTT spacer sequence GTCN PAM
uggauacuuuauugacccgu

SEQ ID NO: 26186 - RNA, 20 nt, Artificial Sequence
  HTT spacer sequence GTCN PAM
auaaaguauccacgacaguu

SEQ ID NO: 26187 - RNA, 20 nt, Artificial Sequence
  HTT spacer sequence GTCN PAM
cucuccgucgcccaggcugg

SEQ ID NO: 26188 - RNA, 20 nt, Artificial Sequence
  HTT spacer sequence GTCN PAM
cccaggcuggaguguggugg

SEQ ID NO: 26189 - RNA, 20 nt, Artificial Sequence
  HTT spacer sequence GTCN PAM
ggaguucgaaacagcuuggc

SEQ ID NO: 26190 - RNA, 20 nt, Artificial Sequence
  HTT spacer sequence GTCN PAM
ggugaacuccuguggcugug

SEQ ID NO: 26191 - RNA, 20 nt, Artificial Sequence
  HTT spacer sequence GTCN PAM
gagagucacgagaucguuca

SEQ ID NO: 26192 - RNA, 20 nt, Artificial Sequence
  HTT spacer sequence GTCN PAM
cgagaucguucaagauagug

SEQ ID NO: 26193 - RNA, 20 nt, Artificial Sequence
  HTT spacer sequence GTCN PAM
ucguuuuggaaaagagggcc

SEQ ID NO: 26194 - RNA, 20 nt, Artificial Sequence
  HTT spacer sequence GTCN PAM
auugauuuuugguccucguu

SEQ ID NO: 26195 - RNA, 20 nt, Artificial Sequence
  HTT spacer sequence GTCN PAM
agaugguagaaaccuuaaaa

SEQ ID NO: 26196 - RNA, 20 nt, Artificial Sequence
  HTT spacer sequence GTCN PAM
aaauagugguaaauaaauau

SEQ ID NO: 26197 - RNA, 20 nt, Artificial Sequence
  HTT spacer sequence GTCN PAM
uuuucuuugagcugauuucu

SEQ ID NO: 26198 - RNA, 20 nt, Artificial Sequence
  HTT spacer sequence GTCN PAM
uugaauucuuaugccacuuu

SEQ ID NO: 26199 - RNA, 20 nt, Artificial Sequence
  HTT spacer sequence GTCN PAM
uuuaaaaagagagauuucug

SEQ ID NO: 26200 - RNA, 20 nt, Artificial Sequence
  HTT spacer sequence GTCN PAM
agcccucacuuauuuuguca

SEQ ID NO: 26201 - RNA, 20 nt, Artificial Sequence
  HTT spacer sequence GTCN PAM
auucuuuuuagcuguuuguc

SEQ ID NO: 26202 - RNA, 20 nt, Artificial Sequence
  HTT spacer sequence GTCN PAM
uugaaucuucauaaagccau

SEQ ID NO: 26203 - RNA, 20 nt, Artificial Sequence
  HTT spacer sequence GTCN PAM
gaaaaugagcaacuggcaag

SEQ ID NO: 26204 - RNA, 20 nt, Artificial Sequence
  HTT spacer sequence GTCN PAM
uggagaggaguucaucagcc

SEQ ID NO: 26205 - RNA, 20 nt, Artificial Sequence
  HTT spacer sequence GTCN PAM
guuuagaaaugaucacuaau

SEQ ID NO: 26206 - RNA, 20 nt, Artificial Sequence
  HTT spacer sequence GTCN PAM
acaaaggcaaugagccaccu

SEQ ID NO: 26207 - RNA, 20 nt, Artificial Sequence
  HTT spacer sequence GTCN PAM
aggcuguguuugaaguuugc

SEQ ID NO: 26208 - RNA, 20 nt, Artificial Sequence
  HTT spacer sequence GTCN PAM
uagaguggggguugcauuag

SEQ ID NO: 26209 - RNA, 20 nt, Artificial Sequence
  HTT spacer sequence GTCN PAM
cccuguccucgcugggauca

SEQ ID NO: 26210 - RNA, 20 nt, Artificial Sequence
  HTT spacer sequence GTCN PAM
ucgcugggaucacaucuguu

SEQ ID NO: 26211 - RNA, 20 nt, Artificial Sequence
  HTT spacer sequence GTCN PAM
uccagcugaacugggacaag

SEQ ID NO: 26212 - RNA, 20 nt, Artificial Sequence
  HTT spacer sequence GTCN PAM
caguucagcuggaagacucu

SEQ ID NO: 26213 - RNA, 20 nt, Artificial Sequence
  HTT spacer sequence GTCN PAM
guuauacuugucccaguuca

SEQ ID NO: 26214 - RNA, 20 nt, Artificial Sequence
  HTT spacer sequence GTCN PAM
gucuguuauacuugucccag

SEQ ID NO: 26215 - RNA, 20 nt, Artificial Sequence
  HTT spacer sequence GTCN PAM
cuuggcagcagacuuucuaa

SEQ ID NO: 26216 - RNA, 20 nt, Artificial Sequence
  HTT spacer sequence GTCN PAM
gcugccaagagacgccuuuc

SEQ ID NO: 26217 - RNA, 20 nt, Artificial Sequence
  HTT spacer sequence GTCN PAM
ugcagcagugccacaaggag

SEQ ID NO: 26218 - RNA, 20 nt, Artificial Sequence
  HTT spacer sequence GTCN PAM
ucauucuccuuguggcacug

SEQ ID NO: 26219 - RNA, 20 nt, Artificial Sequence
  HTT spacer sequence GTCN PAM
cuuccacuugucuucauucu

SEQ ID NO: 26220 - RNA, 20 nt, Artificial Sequence
  HTT spacer sequence GTCN PAM
cgacagauagcugacaucau

SEQ ID NO: 26221 - RNA, 20 nt, Artificial Sequence
  HTT spacer sequence GTCN PAM
agacagucgcuuccacuugu

SEQ ID NO: 26222 - RNA, 20 nt, Artificial Sequence
  HTT spacer sequence GTCN PAM
gcuaucugucgagacagucg

SEQ ID NO: 26223 - RNA, 20 nt, Artificial Sequence
  HTT spacer sequence GTCN PAM
ccgcagccuuggcuuguugu

SEQ ID NO: 26224 - RNA, 20 nt, Artificial Sequence
  HTT spacer sequence GTCN PAM
uugugaaagguggguggcug

SEQ ID NO: 26225 - RNA, 20 nt, Artificial Sequence
  HTT spacer sequence GTCN PAM
uaaucugugccuugauagca

SEQ ID NO: 26226 - RNA, 20 nt, Artificial Sequence
  HTT spacer sequence GTCN PAM
ugggacagcugacuucauuu

SEQ ID NO: 26227 - RNA, 20 nt, Artificial Sequence
  HTT spacer sequence GTCN PAM
caugacuagcacggagaacu

SEQ ID NO: 26228 - RNA, 20 nt, Artificial Sequence
  HTT spacer sequence GTCN PAM
gcugucccaugacuagcacg

SEQ ID NO: 26229 - RNA, 20 nt, Artificial Sequence
  HTT spacer sequence GTCN PAM
acccaguguuuuauuuggug

SEQ ID NO: 26230 - RNA, 20 nt, Artificial Sequence
  HTT spacer sequence GTCN PAM
gaaaggaaaggaagggaaag

SEQ ID NO: 26231 - RNA, 20 nt, Artificial Sequence
  HTT spacer sequence GTCN PAM
cacucugucacccaggcuag

SEQ ID NO: 26232 - RNA, 20 nt, Artificial Sequence
  HTT spacer sequence GTCN PAM
cccaggcuagagugcagucg

SEQ ID NO: 26233 - RNA, 20 nt, Artificial Sequence
  HTT spacer sequence GTCN PAM
uguaaucucacugcaacaac

SEQ ID NO: 26234 - RNA, 20 nt, Artificial Sequence
  HTT spacer sequence GTCN PAM
uugcuacucaggaggcugag

SEQ ID NO: 26235 - RNA, 20 nt, Artificial Sequence
  HTT spacer sequence GTCN PAM
cgcuguguugcccaggcugg

SEQ ID NO: 26236 - RNA, 20 nt, Artificial Sequence
  HTT spacer sequence GTCN PAM
uuugaucauagaaauucuga

SEQ ID NO: 26237 - RNA, 20 nt, Artificial Sequence
  HTT spacer sequence GTCN PAM
ggcacaggccacugugcccc

SEQ ID NO: 26238 - RNA, 20 nt, Artificial Sequence
  HTT spacer sequence GTCN PAM
ccaccacccuucucugugag

SEQ ID NO: 26239 - RNA, 20 nt, Artificial Sequence
  HTT spacer sequence GTCN PAM
acuuaaaaggcaaccucaag

SEQ ID NO: 26240 - RNA, 20 nt, Artificial Sequence
  HTT spacer sequence GTCN PAM
gugguuuuuggcauuugauu

SEQ ID NO: 26241 - RNA, 20 nt, Artificial Sequence
  HTT spacer sequence GTCN PAM
ugaaggcaguaacaucaaua

SEQ ID NO: 26242 - RNA, 20 nt, Artificial Sequence
  HTT spacer sequence GTCN PAM
caagauaacauuccauuaug

SEQ ID NO: 26243 - RNA, 20 nt, Artificial Sequence
  HTT spacer sequence GTCN PAM
aacuggucucaagauaacau

SEQ ID NO: 26244 - RNA, 20 nt, Artificial Sequence
  HTT spacer sequence GTCN PAM
uguugucuaacuggucucaa

SEQ ID NO: 26245 - RNA, 20 nt, Artificial Sequence
  HTT spacer sequence GTCN PAM
aucucaccagaagccaagau

SEQ ID NO: 26246 - RNA, 20 nt, Artificial Sequence
  HTT spacer sequence GTCN PAM
gggucucccugccuacagau

SEQ ID NO: 26247 - RNA, 20 nt, Artificial Sequence
  HTT spacer sequence GTCN PAM
cccugccuacagaugguuuu

SEQ ID NO: 26248 - RNA, 20 nt, Artificial Sequence
  HTT spacer sequence GTCN PAM
gguauuuacuauguauucag

SEQ ID NO: 26249 - RNA, 20 nt, Artificial Sequence
  HTT spacer sequence GTCN PAM
uucuuuaaucugcuuugauc

SEQ ID NO: 26250 - RNA, 20 nt, Artificial Sequence
  HTT spacer sequence GTCN PAM
ccuuacccgcaucccaacaa

SEQ ID NO: 26251 - RNA, 20 nt, Artificial Sequence
  HTT spacer sequence GTCN PAM
guccccuuacccgcauccca

SEQ ID NO: 26252 - RNA, 20 nt, Artificial Sequence
  HTT spacer sequence GTCN PAM
auaccauggcggcugaucag

SEQ ID NO: 26253 - RNA, 20 nt, Artificial Sequence
  HTT spacer sequence GTCN PAM
gcggugggaguggcauuguu

SEQ ID NO: 26254 - RNA, 20 nt, Artificial Sequence
  HTT spacer sequence GTCN PAM
ccagaucaccaaagcuucuu

SEQ ID NO: 26255 - RNA, 20 nt, Artificial Sequence
  HTT spacer sequence GTCN PAM
gccccccgccagggccuuug

SEQ ID NO: 26256 - RNA, 20 nt, Artificial Sequence
  HTT spacer sequence GTCN PAM
cacauggguggcccugcucu

SEQ ID NO: 26257 - RNA, 20 nt, Artificial Sequence
  HTT spacer sequence GTCN PAM
gcaucccuuggcagcaugaa

SEQ ID NO: 26258 - RNA, 20 nt, Artificial Sequence
  HTT spacer sequence GTCN PAM
ucacccugaaaucaccccca

SEQ ID NO: 26259 - RNA, 20 nt, Artificial Sequence
  HTT spacer sequence GTCN PAM
acagccacccuguccucacc

SEQ ID NO: 26260 - RNA, 20 nt, Artificial Sequence
  HTT spacer sequence GTCN PAM
gcccuaccuuguccacagcc

SEQ ID NO: 26261 - RNA, 20 nt, Artificial Sequence
  HTT spacer sequence GTCN PAM
gagccugucuggauguagca

SEQ ID NO: 26262 - RNA, 20 nt, Artificial Sequence
  HTT spacer sequence GTCN PAM
ggauguagcaguugagaccc

SEQ ID NO: 26263 - RNA, 20 nt, Artificial Sequence
  HTT spacer sequence GTCN PAM
caacugcuacauccagacag

SEQ ID NO: 26264 - RNA, 20 nt, Artificial Sequence
  HTT spacer sequence GTCN PAM
agagacuguggggcaggggg

SEQ ID NO: 26265 - RNA, 20 nt, Artificial Sequence
  HTT spacer sequence GTCN PAM
cucgacaacuccaggcucau

SEQ ID NO: 26266 - RNA, 20 nt, Artificial Sequence
  HTT spacer sequence GTCN PAM
gcaucugagauguccacuca

SEQ ID NO: 26267 - RNA, 20 nt, Artificial Sequence
  HTT spacer sequence GTCN PAM
acucacaguggacccagacu

SEQ ID NO: 26268 - RNA, 20 nt, Artificial Sequence
  HTT spacer sequence GTCN PAM
acugugaguggacaucucag

SEQ ID NO: 26269 - RNA, 20 nt, Artificial Sequence
  HTT spacer sequence GTCN PAM
ggguccacugugaguggaca

SEQ ID NO: 26270 - RNA, 20 nt, Artificial Sequence
  HTT spacer sequence GTCN PAM
cagcuccaaggucagguagg

SEQ ID NO: 26271 - RNA, 20 nt, Artificial Sequence
  HTT spacer sequence GTCN PAM
gguaggugaggggagccagu

SEQ ID NO: 26272 - RNA, 20 nt, Artificial Sequence
  HTT spacer sequence GTCN PAM
cccuccugcacaaaaugccu

SEQ ID NO: 26273 - RNA, 20 nt, Artificial Sequence
  HTT spacer sequence GTCN PAM
gcaccuugggaacuuggccc

SEQ ID NO: 26274 - RNA, 20 nt, Artificial Sequence
  HTT spacer sequence GTCN PAM
uuucaggaacacauucccau

SEQ ID NO: 26275 - RNA, 20 nt, Artificial Sequence
  HTT spacer sequence GTCN PAM
cucuccuguccuuucaggaa

SEQ ID NO: 26276 - RNA, 20 nt, Artificial Sequence
  HTT spacer sequence GTCN PAM
gcaauggguuaaguuggcag

SEQ ID NO: 26277 - RNA, 20 nt, Artificial Sequence
  HTT spacer sequence GTCN PAM
ugaacugauccucccuguug

SEQ ID NO: 26278 - RNA, 20 nt, Artificial Sequence
  HTT spacer sequence GTCN PAM
ccugugucaugaacugaucc

SEQ ID NO: 26279 - RNA, 20 nt, Artificial Sequence
  HTT spacer sequence GTCN PAM
gugaacaccacaacggcgau

SEQ ID NO: 26280 - RNA, 20 nt, Artificial Sequence
  HTT spacer sequence GTCN PAM
uccaugcagccaauccuaac

SEQ ID NO: 26281 - RNA, 20 nt, Artificial Sequence
  HTT spacer sequence GTCN PAM
aggaugcaggaauccuggag

SEQ ID NO: 26282 - RNA, 20 nt, Artificial Sequence
  HTT spacer sequence GTCN PAM
guuguucccuuguuguaaga

SEQ ID NO: 26283 - RNA, 20 nt, Artificial Sequence
  HTT spacer sequence GTCN PAM
gugcccaccaucaauaagua

SEQ ID NO: 26284 - RNA, 20 nt, Artificial Sequence
  HTT spacer sequence GTCN PAM
aagcuuauaccacagugugu

SEQ ID NO: 26285 - RNA, 20 nt, Artificial Sequence
  HTT spacer sequence GTCN PAM
caaacuccugagcucaagca

SEQ ID NO: 26286 - RNA, 20 nt, Artificial Sequence
  HTT spacer sequence GTCN PAM
cuacuagaaauacaaaaagu

SEQ ID NO: 26287 - RNA, 20 nt, Artificial Sequence
  HTT spacer sequence GTCN PAM
uggcuaacucaggaggcuga

SEQ ID NO: 26288 - RNA, 20 nt, Artificial Sequence
  HTT spacer sequence GTCN PAM
cacucugugccccaggagug

SEQ ID NO: 26289 - RNA, 20 nt, Artificial Sequence
  HTT spacer sequence GTCN PAM
cugcucuucucacuuaaccc

SEQ ID NO: 26290 - RNA, 20 nt, Artificial Sequence
  HTT spacer sequence GTCN PAM
cuuuguauacacauacaugg

SEQ ID NO: 26291 - RNA, 20 nt, Artificial Sequence
  HTT spacer sequence GTCN PAM
uccaagcgucccuuuguaua

SEQ ID NO: 26292 - RNA, 20 nt, Artificial Sequence
  HTT spacer sequence GTCN PAM
ccaaaauguugguaaugauu

SEQ ID NO: 26293 - RNA, 20 nt, Artificial Sequence
  HTT spacer sequence GTCN PAM
gggugcugcagugcuaguug

SEQ ID NO: 26294 - RNA, 20 nt, Artificial Sequence
  HTT spacer sequence GTCN PAM
uuuacagaaagcauuuauua

SEQ ID NO: 26295 - RNA, 20 nt, Artificial Sequence
  HTT spacer sequence GTCN PAM
uuuagauuuuuauuacauaa

SEQ ID NO: 26296 - RNA, 20 nt, Artificial Sequence
  HTT spacer sequence GTCN PAM
ccuucccucauuuaaaagca

SEQ ID NO: 26297 - RNA, 20 nt, Artificial Sequence
  HTT spacer sequence GTCN PAM
uuucuuuuggcuuacguaga

SEQ ID NO: 26298 - RNA, 20 nt, Artificial Sequence
  HTT spacer sequence GTCN PAM
aauuccacagaugcacauug

SEQ ID NO: 26299 - RNA, 20 nt, Artificial Sequence
  HTT spacer sequence GTCN PAM
augugcaucuguggaauuag

SEQ ID NO: 26300 - RNA, 20 nt, Artificial Sequence
  HTT spacer sequence GTCN PAM
gguagacaugcuuuuacgga

SEQ ID NO: 26301 - RNA, 20 nt, Artificial Sequence
  HTT spacer sequence GTCN PAM
accggacggagggaggaagg

SEQ ID NO: 26302 - RNA, 20 nt, Artificial Sequence
  HTT spacer sequence GTCN PAM
cuccaaacacaauggugagu

SEQ ID NO: 26303 - RNA, 20 nt, Artificial Sequence
  HTT spacer sequence GTCN PAM
cucgccuggcucagcagaug

SEQ ID NO: 26304 - RNA, 20 nt, Artificial Sequence
  HTT spacer sequence GTCN PAM
agauucaucugcugagccag

SEQ ID NO: 26305 - RNA, 20 nt, Artificial Sequence
  HTT spacer sequence GTCN PAM
caguaaucagagccugaaca

SEQ ID NO: 26306 - RNA, 20 nt, Artificial Sequence
  HTT spacer sequence GTCN PAM
gagucagucaguuuggguag

SEQ ID NO: 26307 - RNA, 20 nt, Artificial Sequence
  HTT spacer sequence GTCN PAM
gucaguuuggguagggcuuc

SEQ ID NO: 26308 - RNA, 20 nt, Artificial Sequence
  HTT spacer sequence GTCN PAM
guuuggguagggcuucuuga

SEQ ID NO: 26309 - RNA, 20 nt, Artificial Sequence
  HTT spacer sequence GTCN PAM
cacucugucgcccaggcugg

SEQ ID NO: 26310 - RNA, 20 nt, Artificial Sequence
  HTT spacer sequence GTCN PAM
cccaggcuggaguacagugu

SEQ ID NO: 26311 - RNA, 20 nt, Artificial Sequence
  HTT spacer sequence GTCN PAM
ugaucucggcucacugcaag

SEQ ID NO: 26312 - RNA, 20 nt, Artificial Sequence
  HTT spacer sequence GTCN PAM
cagcaacucgggaggcugag

SEQ ID NO: 26313 - RNA, 20 nt, Artificial Sequence
  HTT spacer sequence GTCN PAM
ugaucuccugaccucgugac

SEQ ID NO: 26314 - RNA, 20 nt, Artificial Sequence
  HTT spacer sequence GTCN PAM
ggagaucaagaccauccugg

SEQ ID NO: 26315 - RNA, 20 nt, Artificial Sequence
  HTT spacer sequence GTCN PAM
cgaggucaggagaucaagac

SEQ ID NO: 26316 - RNA, 20 nt, Artificial Sequence
  HTT spacer sequence GTCN PAM
cccaggcuggaguacagugg

SEQ ID NO: 26317 - RNA, 20 nt, Artificial Sequence
  HTT spacer sequence GTCN PAM
agguagcgccacuguacucc

SEQ ID NO: 26318 - RNA, 20 nt, Artificial Sequence
  HTT spacer sequence GTCN PAM
cagcuacucgggaggcugag

SEQ ID NO: 26319 - RNA, 20 nt, Artificial Sequence
  HTT spacer sequence GTCN PAM
cuacuaaaaauacaaaaaau

SEQ ID NO: 26320 - RNA, 20 nt, Artificial Sequence
  HTT spacer sequence GTCN PAM
cgaucuccugaccuugugau

SEQ ID NO: 26321 - RNA, 20 nt, Artificial Sequence
  HTT spacer sequence GTCN PAM
ggagaucgcgaccauccugg

SEQ ID NO: 26322 - RNA, 20 nt, Artificial Sequence
  HTT spacer sequence GTCN PAM
caaagugugcucccagaaaa

SEQ ID NO: 26323 - RNA, 20 nt, Artificial Sequence
  HTT spacer sequence GTCN PAM
cagcugaagaaaaaaggaag

SEQ ID NO: 26324 - RNA, 20 nt, Artificial Sequence
  HTT spacer sequence GTCN PAM
gugagcacuguucaacugug

SEQ ID NO: 26325 - RNA, 20 nt, Artificial Sequence
  HTT spacer sequence GTCN PAM
acugaagauauuguucuuuc

SEQ ID NO: 26326 - RNA, 20 nt, Artificial Sequence
  HTT spacer sequence GTCN PAM
ccaucucuuaaccuauuaau

SEQ ID NO: 26327 - RNA, 20 nt, Artificial Sequence
  HTT spacer sequence GTCN PAM
cgugauguuucacagucagu

SEQ ID NO: 26328 - RNA, 20 nt, Artificial Sequence
  HTT spacer sequence GTCN PAM
guaagucuggaauaauaccu

SEQ ID NO: 26329 - RNA, 20 nt, Artificial Sequence
  HTT spacer sequence GTCN PAM
ggaauaauaccuggucuugc

SEQ ID NO: 26330 - RNA, 20 nt, Artificial Sequence
  HTT spacer sequence GTCN PAM
ugcuucacuucugaguuggg

SEQ ID NO: 26331 - RNA, 20 nt, Artificial Sequence
  HTT spacer sequence GTCN PAM
guaucaguguaauuuucuaa

SEQ ID NO: 26332 - RNA, 20 nt, Artificial Sequence
  HTT spacer sequence GTCN PAM
ugcauuaucuauggcucuug

SEQ ID NO: 26333 - RNA, 20 nt, Artificial Sequence
  HTT spacer sequence GTCN PAM
ugaaguucugucauguucug

SEQ ID NO: 26334 - RNA, 20 nt, Artificial Sequence
  HTT spacer sequence GTCN PAM
uguucugucucuuguccuca

SEQ ID NO: 26335 - RNA, 20 nt, Artificial Sequence
  HTT spacer sequence GTCN PAM
cuuguccucaguagagaugc

SEQ ID NO: 26336 - RNA, 20 nt, Artificial Sequence
  HTT spacer sequence GTCN PAM
ucaguagagaugcuacagca

SEQ ID NO: 26337 - RNA, 20 nt, Artificial Sequence
  HTT spacer sequence GTCN PAM
ugggggcaggcaguaggggc

SEQ ID NO: 26338 - RNA, 20 nt, Artificial Sequence
  HTT spacer sequence GTCN PAM
gcgugccccuacugccugcc

SEQ ID NO: 26339 - RNA, 20 nt, Artificial Sequence
  HTT spacer sequence GTCN PAM
gggaaguugaaacccaagag

SEQ ID NO: 26340 - RNA, 20 nt, Artificial Sequence
  HTT spacer sequence GTCN PAM
cagauugucaccaugugcug

SEQ ID NO: 26341 - RNA, 20 nt, Artificial Sequence
  HTT spacer sequence GTCN PAM
ccaugugcuggcaguuuuac

SEQ ID NO: 26342 - RNA, 20 nt, Artificial Sequence
  HTT spacer sequence GTCN PAM
guaauaaaagucuucucccu

SEQ ID NO: 26343 - RNA, 20 nt, Artificial Sequence
  HTT spacer sequence GTCN PAM
ucucccugcagggcagccug

SEQ ID NO: 26344 - RNA, 20 nt, Artificial Sequence
  HTT spacer sequence GTCN PAM
ucccucauaaauuguuugga

SEQ ID NO: 26345 - RNA, 20 nt, Artificial Sequence
  HTT spacer sequence GTCN PAM
uuggggagcuuccaaacaau

SEQ ID NO: 26346 - RNA, 20 nt, Artificial Sequence
  HTT spacer sequence GTCN PAM
cucuccaccuuugcuagauu

SEQ ID NO: 26347 - RNA, 20 nt, Artificial Sequence
  HTT spacer sequence GTCN PAM
cagccacuuagcagaagcag

SEQ ID NO: 26348 - RNA, 20 nt, Artificial Sequence
  HTT spacer sequence GTCN PAM
ucaguggagaugcccugugu

SEQ ID NO: 26349 - RNA, 20 nt, Artificial Sequence
  HTT spacer sequence GTCN PAM
aaggagauaagcccaguaag

SEQ ID NO: 26350 - RNA, 20 nt, Artificial Sequence
  HTT spacer sequence GTCN PAM
cauugaagcagcuggcuaaa

SEQ ID NO: 26351 - RNA, 20 nt, Artificial Sequence
  HTT spacer sequence GTCN PAM
caggaauuuaauguaucauc

SEQ ID NO: 26352 - RNA, 20 nt, Artificial Sequence
  HTT spacer sequence GTCN PAM
cucuguguaucaccuuccuc

SEQ ID NO: 26353 - RNA, 20 nt, Artificial Sequence
  HTT spacer sequence GTCN PAM
cuuggucucucuguguauca

SEQ ID NO: 26354 - RNA, 20 nt, Artificial Sequence
  HTT spacer sequence GTCN PAM
acggcgacggcgcucugcau

SEQ ID NO: 26355 - RNA, 20 nt, Artificial Sequence
  HTT spacer sequence GTCN PAM
ccguggacacagucacuugg

SEQ ID NO: 26356 - RNA, 20 nt, Artificial Sequence
  HTT spacer sequence GTCN PAM
ccuaauucacugucaucuuu

SEQ ID NO: 26357 - RNA, 20 nt, Artificial Sequence
  HTT spacer sequence GTCN PAM
ucuuuuuuguuucuuggaag

SEQ ID NO: 26358 - RNA, 20 nt, Artificial Sequence
  HTT spacer sequence GTCN PAM
ucuaaaagaauaccaaccag

SEQ ID NO: 26359 - RNA, 20 nt, Artificial Sequence
  HTT spacer sequence GTCN PAM
gauccacaucuucaagucug

SEQ ID NO: 26360 - RNA, 20 nt, Artificial Sequence
  HTT spacer sequence GTCN PAM
gguaggugaaucacauuagu

SEQ ID NO: 26361 - RNA, 20 nt, Artificial Sequence
  HTT spacer sequence GTCN PAM
uccuggagugucucguuccc

SEQ ID NO: 26362 - RNA, 20 nt, Artificial Sequence
  HTT spacer sequence GTCN PAM
cguuccccauucugcacuau

SEQ ID NO: 26363 - RNA, 20 nt, Artificial Sequence
  HTT spacer sequence GTCN PAM
caugguaucagguguacucu

SEQ ID NO: 26364 - RNA, 20 nt, Artificial Sequence
  HTT spacer sequence GTCN PAM
cucgauggaugaauggauaa

SEQ ID NO: 26365 - RNA, 20 nt, Artificial Sequence
  HTT spacer sequence GTCN PAM
uuuuuuuaaggcugaauaau

SEQ ID NO: 26366 - RNA, 20 nt, Artificial Sequence
  HTT spacer sequence GTCN PAM
gaauguccuuuuuuuaaggc

SEQ ID NO: 26367 - RNA, 20 nt, Artificial Sequence
  HTT spacer sequence GTCN PAM
cccauguuguagcauguguc

SEQ ID NO: 26368 - RNA, 20 nt, Artificial Sequence
  HTT spacer sequence GTCN PAM
uuaagggucacccauguugu

SEQ ID NO: 26369 - RNA, 20 nt, Artificial Sequence
  HTT spacer sequence GTCN PAM
caaaaggacaaauacuaugu

SEQ ID NO: 26370 - RNA, 20 nt, Artificial Sequence
  HTT spacer sequence GTCN PAM
uuuugugacuggcuuauuuc

SEQ ID NO: 26371 - RNA, 20 nt, Artificial Sequence
  HTT spacer sequence GTCN PAM
cucauguaaguggaaucaca

SEQ ID NO: 26372 - RNA, 20 nt, Artificial Sequence
  HTT spacer sequence GTCN PAM
ucuuaacuauuuuuaacugu

SEQ ID NO: 26373 - RNA, 20 nt, Artificial Sequence
  HTT spacer sequence GTCN PAM
uggcucaugccugaaaucca

SEQ ID NO: 26374 - RNA, 20 nt, Artificial Sequence
  HTT spacer sequence GTCN PAM
caaacuccuuggcucaagca

SEQ ID NO: 26375 - RNA, 20 nt, Artificial Sequence
  HTT spacer sequence GTCN PAM
uaccauguugcugaggcugg

SEQ ID NO: 26376 - RNA, 20 nt, Artificial Sequence
  HTT spacer sequence GTCN PAM
cagcuacucaggagacugag

SEQ ID NO: 26377 - RNA, 20 nt, Artificial Sequence
  HTT spacer sequence GTCN PAM
ccugaguagcugggaccaca

SEQ ID NO: 26378 - RNA, 20 nt, Artificial Sequence
  HTT spacer sequence GTCN PAM
cuagugagauguguucaugc

SEQ ID NO: 26379 - RNA, 20 nt, Artificial Sequence
  HTT spacer sequence GTCN PAM
uacucuauagccgaggcugg

SEQ ID NO: 26380 - RNA, 20 nt, Artificial Sequence
  HTT spacer sequence GTCN PAM
uguuuuguuuuguuuuuuug

SEQ ID NO: 26381 - RNA, 20 nt, Artificial Sequence
  HTT spacer sequence GTCN PAM
agguaaaaggaucacuugaa

SEQ ID NO: 26382 - RNA, 20 nt, Artificial Sequence
  HTT spacer sequence GTCN PAM
caagcuccuggcuucaagug

SEQ ID NO: 26383 - RNA, 20 nt, Artificial Sequence
  HTT spacer sequence GTCN PAM
cgauauguugcucaggcugg

SEQ ID NO: 26384 - RNA, 20 nt, Artificial Sequence
  HTT spacer sequence GTCN PAM
cagcuacuugggaggcugag

SEQ ID NO: 26385 - RNA, 20 nt, Artificial Sequence
  HTT spacer sequence GTCN PAM
uugaucauuuguaaaaguaa

SEQ ID NO: 26386 - RNA, 20 nt, Artificial Sequence
  HTT spacer sequence GTCN PAM
caagcucaagcgaucacccc

SEQ ID NO: 26387 - RNA, 20 nt, Artificial Sequence
  HTT spacer sequence GTCN PAM
aggcuggucucaagcucaag

SEQ ID NO: 26388 - RNA, 20 nt, Artificial Sequence
  HTT spacer sequence GTCN PAM
cuugcuauguuguccaggcu

SEQ ID NO: 26389 - RNA, 20 nt, Artificial Sequence
  HTT spacer sequence GTCN PAM
agcuguagugagccaugauc

SEQ ID NO: 26390 - RNA, 20 nt, Artificial Sequence
  HTT spacer sequence GTCN PAM
cgaucucgcccaggcuggag

SEQ ID NO: 26391 - RNA, 20 nt, Artificial Sequence
  HTT spacer sequence GTCN PAM
cuagagaaagaaaaugacaa

SEQ ID NO: 26392 - RNA, 20 nt, Artificial Sequence
  HTT spacer sequence GTCN PAM
uuuucuuucucuagagacau

SEQ ID NO: 26393 - RNA, 20 nt, Artificial Sequence
  HTT spacer sequence GTCN PAM
uugucauuuucuuucucuag

SEQ ID NO: 26394 - RNA, 20 nt, Artificial Sequence
  HTT spacer sequence GTCN PAM
uaagaugccagcugugcagc

SEQ ID NO: 26395 - RNA, 20 nt, Artificial Sequence
  HTT spacer sequence GTCN PAM
aaauuaggacaguguguuuu

SEQ ID NO: 26396 - RNA, 20 nt, Artificial Sequence
  HTT spacer sequence GTCN PAM
uaauuuggacuggcugcuuu

SEQ ID NO: 26397 - RNA, 20 nt, Artificial Sequence
  HTT spacer sequence GTCN PAM
uuuauuuaaagcaaagcauu

SEQ ID NO: 26398 - RNA, 20 nt, Artificial Sequence
  HTT spacer sequence GTCN PAM
uucuucucucaagaaaauag

SEQ ID NO: 26399 - RNA, 20 nt, Artificial Sequence
  HTT spacer sequence GTCN PAM
ugguccaaauaugaggcaaa

SEQ ID NO: 26400 - RNA, 20 nt, Artificial Sequence
  HTT spacer sequence GTCN PAM
aaauaugaggcaaaccaaaa

SEQ ID NO: 26401 - RNA, 20 nt, Artificial Sequence
  HTT spacer sequence GTCN PAM
cgaucaaagaccuauagaaa

SEQ ID NO: 26402 - RNA, 20 nt, Artificial Sequence
  HTT spacer sequence GTCN PAM
uugaucgugacuccuaagcc

SEQ ID NO: 26403 - RNA, 20 nt, Artificial Sequence
  HTT spacer sequence GTCN PAM
uaauguaaauacugcuugag

SEQ ID NO: 26404 - RNA, 20 nt, Artificial Sequence
  HTT spacer sequence GTCN PAM
caaaaaaaaaaagaaagaaa

SEQ ID NO: 26405 - RNA, 20 nt, Artificial Sequence
  HTT spacer sequence GTCN PAM
cuacuaaaaauacaaaaaau

SEQ ID NO: 26406 - RNA, 20 nt, Artificial Sequence
  HTT spacer sequence GTCN PAM
cgaacuccugaccucaggug

SEQ ID NO: 26407 - RNA, 20 nt, Artificial Sequence
  HTT spacer sequence GTCN PAM
ggaguucgagaccagccuca

SEQ ID NO: 26408 - RNA, 20 nt, Artificial Sequence
  HTT spacer sequence GTCN PAM
uacauugauuucaaaaauga

SEQ ID NO: 26409 - RNA, 20 nt, Artificial Sequence
  HTT spacer sequence GTCN PAM
ucaguguuucagucauacau

SEQ ID NO: 26410 - RNA, 20 nt, Artificial Sequence
  HTT spacer sequence GTCN PAM
guaagucuucaguguuucag

SEQ ID NO: 26411 - RNA, 20 nt, Artificial Sequence
  HTT spacer sequence GTCN PAM
ucgguucugaugaauauaaa

SEQ ID NO: 26412 - RNA, 20 nt, Artificial Sequence
  HTT spacer sequence GTCN PAM
acuucagaugauguaaccau

SEQ ID NO: 26413 - RNA, 20 nt, Artificial Sequence
  HTT spacer sequence GTCN PAM
gucaacuucagaugauguaa

SEQ ID NO: 26414 - RNA, 20 nt, Artificial Sequence
  HTT spacer sequence GTCN PAM
ccaaauagaacuaaacaugu

SEQ ID NO: 26415 - RNA, 20 nt, Artificial Sequence
  HTT spacer sequence GTCN PAM
aaaguugucugaagucuaua

SEQ ID NO: 26416 - RNA, 20 nt, Artificial Sequence
  HTT spacer sequence GTCN PAM
gaagucuauaaaucaugaca

SEQ ID NO: 26417 - RNA, 20 nt, Artificial Sequence
  HTT spacer sequence GTCN PAM
auaaaucaugacaaauuaug

SEQ ID NO: 26418 - RNA, 20 nt, Artificial Sequence
  HTT spacer sequence GTCN PAM
ugauuuauagacuucagaca

SEQ ID NO: 26419 - RNA, 20 nt, Artificial Sequence
  HTT spacer sequence GTCN PAM
uucaguugcagggauaaaac

SEQ ID NO: 26420 - RNA, 20 nt, Artificial Sequence
  HTT spacer sequence GTCN PAM
uaccaacuacccuugccugc

SEQ ID NO: 26421 - RNA, 20 nt, Artificial Sequence
  HTT spacer sequence GTCN PAM
gcauuguauauuuaugcauc

SEQ ID NO: 26422 - RNA, 20 nt, Artificial Sequence
  HTT spacer sequence GTCN PAM
cacuuugucgccuaggcuga

SEQ ID NO: 26423 - RNA, 20 nt, Artificial Sequence
  HTT spacer sequence GTCN PAM
ccuaggcugaagugcagugg

SEQ ID NO: 26424 - RNA, 20 nt, Artificial Sequence
  HTT spacer sequence GTCN PAM
cagcuacuuagaaggcugag

SEQ ID NO: 26425 - RNA, 20 nt, Artificial Sequence
  HTT spacer sequence GTCN PAM
ugcuguguugcccaggcggg

SEQ ID NO: 26426 - RNA, 20 nt, Artificial Sequence
  HTT spacer sequence GTCN PAM
uuaacucuuagcuucaggcg

SEQ ID NO: 26427 - RNA, 20 nt, Artificial Sequence
  HTT spacer sequence GTCN PAM
cccaccacgcccagucucau

SEQ ID NO: 26428 - RNA, 20 nt, Artificial Sequence
  HTT spacer sequence GTCN PAM
caucucugcuuccuguguua

SEQ ID NO: 26429 - RNA, 20 nt, Artificial Sequence
  HTT spacer sequence GTCN PAM
ugugaaaacagcccaccaga

SEQ ID NO: 26430 - RNA, 20 nt, Artificial Sequence
  HTT spacer sequence GTCN PAM
ucuucggucaugugaaaaca

SEQ ID NO: 26431 - RNA, 20 nt, Artificial Sequence
  HTT spacer sequence GTCN PAM
cccauauuacucaugcaagg

SEQ ID NO: 26432 - RNA, 20 nt, Artificial Sequence
  HTT spacer sequence GTCN PAM
acaugggccaaaugggagac

SEQ ID NO: 26433 - RNA, 20 nt, Artificial Sequence
  HTT spacer sequence GTCN PAM
cccauuuggcccauguggac

SEQ ID NO: 26434 - RNA, 20 nt, Artificial Sequence
  HTT spacer sequence GTCN PAM
agucucccauuuggcccaug

SEQ ID NO: 26435 - RNA, 20 nt, Artificial Sequence
  HTT spacer sequence GTCN PAM
ccgggaguaagggagaggag

SEQ ID NO: 26436 - RNA, 20 nt, Artificial Sequence
  HTT spacer sequence GTCN PAM
gcugcaagggauagcagcac

SEQ ID NO: 26437 - RNA, 20 nt, Artificial Sequence
  HTT spacer sequence GTCN PAM
auuugaggauacucuuggcg

SEQ ID NO: 26438 - RNA, 20 nt, Artificial Sequence
  HTT spacer sequence GTCN PAM
gugcgucaguaucacaaguc

SEQ ID NO: 26439 - RNA, 20 nt, Artificial Sequence
  HTT spacer sequence GTCN PAM
guaucacaagucuugauauu

SEQ ID NO: 26440 - RNA, 20 nt, Artificial Sequence
  HTT spacer sequence GTCN PAM
ugauauuuccuaugaagaag

SEQ ID NO: 26441 - RNA, 20 nt, Artificial Sequence
  HTT spacer sequence GTCN PAM
cugcacuacuguucuucuuc

SEQ ID NO: 26442 - RNA, 20 nt, Artificial Sequence
  HTT spacer sequence GTCN PAM
gucacugcacuacuguucuu

SEQ ID NO: 26443 - RNA, 20 nt, Artificial Sequence
  HTT spacer sequence GTCN PAM
cccuccgcacaggccauggc

SEQ ID NO: 26444 - RNA, 20 nt, Artificial Sequence
  HTT spacer sequence GTCN PAM
acuaugaaaauuaaauuuug

SEQ ID NO: 26445 - RNA, 20 nt, Artificial Sequence
  HTT spacer sequence GTCN PAM
gugaagcauaauccgaagau

SEQ ID NO: 26446 - RNA, 20 nt, Artificial Sequence
  HTT spacer sequence GTCN PAM
auuuuaguauguuggucauu

SEQ ID NO: 26447 - RNA, 20 nt, Artificial Sequence
  HTT spacer sequence GTCN PAM
uuuuaauauuuugccaccag

SEQ ID NO: 26448 - RNA, 20 nt, Artificial Sequence
  HTT spacer sequence GTCN PAM
ccuccuggcaucaaauccaa

SEQ ID NO: 26449 - RNA, 20 nt, Artificial Sequence
  HTT spacer sequence GTCN PAM
uuagaaaugaggcugucucc

SEQ ID NO: 26450 - RNA, 20 nt, Artificial Sequence
  HTT spacer sequence GTCN PAM
ugccuuugugggauaagggu

SEQ ID NO: 26451 - RNA, 20 nt, Artificial Sequence
  HTT spacer sequence GTCN PAM
uucuacauguccgagcgauc

SEQ ID NO: 26452 - RNA, 20 nt, Artificial Sequence
  HTT spacer sequence GTCN PAM
gagcgaucucugugcagcuc

SEQ ID NO: 26453 - RNA, 20 nt, Artificial Sequence
  HTT spacer sequence GTCN PAM
cugucuuauugcgcugauuu

SEQ ID NO: 26454 - RNA, 20 nt, Artificial Sequence
  HTT spacer sequence GTCN PAM
uauugcgcugauuuccucuc

SEQ ID NO: 26455 - RNA, 20 nt, Artificial Sequence
  HTT spacer sequence GTCN PAM
aauaggacuuccagcagaga

SEQ ID NO: 26456 - RNA, 20 nt, Artificial Sequence
  HTT spacer sequence GTCN PAM
uauuggacaacacuucaaca

SEQ ID NO: 26457 - RNA, 20 nt, Artificial Sequence
  HTT spacer sequence GTCN PAM
cugcuggaaguccuauugga

SEQ ID NO: 26458 - RNA, 20 nt, Artificial Sequence
  HTT spacer sequence GTCN PAM
gcacugucuaauuuaguugc

SEQ ID NO: 26459 - RNA, 20 nt, Artificial Sequence
  HTT spacer sequence GTCN PAM
aauuuaguugccuuuagcca

SEQ ID NO: 26460 - RNA, 20 nt, Artificial Sequence
  HTT spacer sequence GTCN PAM
gauuggauagcuuaauuuau

SEQ ID NO: 26461 - RNA, 20 nt, Artificial Sequence
  HTT spacer sequence GTCN PAM
cauacaggagccacuaucca

SEQ ID NO: 26462 - RNA, 20 nt, Artificial Sequence
  HTT spacer sequence GTCN PAM
guugagaagcagcuuuacug

SEQ ID NO: 26463 - RNA, 20 nt, Artificial Sequence
  HTT spacer sequence GTCN PAM
aaagauaccagcaggaaacc

SEQ ID NO: 26464 - RNA, 20 nt, Artificial Sequence
  HTT spacer sequence GTCN PAM
ucuuguuuccuuugacugca

SEQ ID NO: 26465 - RNA, 20 nt, Artificial Sequence
  HTT spacer sequence GTCN PAM
aaggaaacaagaagacagaa

SEQ ID NO: 26466 - RNA, 20 nt, Artificial Sequence
  HTT spacer sequence GTCN PAM
uucaaauaaaugcagucaaa

SEQ ID NO: 26467 - RNA, 20 nt, Artificial Sequence
  HTT spacer sequence GTCN PAM
ucauuuucgguuuaugggug

SEQ ID NO: 26468 - RNA, 20 nt, Artificial Sequence
  HTT spacer sequence GTCN PAM
auuucaggcguggguacuuc

SEQ ID NO: 26469 - RNA, 20 nt, Artificial Sequence
  HTT spacer sequence GTCN PAM
gaauggcacccuugacuuuu

SEQ ID NO: 26470 - RNA, 20 nt, Artificial Sequence
  HTT spacer sequence GTCN PAM
agggugccauucugacuagu

SEQ ID NO: 26471 - RNA, 20 nt, Artificial Sequence
  HTT spacer sequence GTCN PAM
uccuguuuacaacauuuggg

SEQ ID NO: 26472 - RNA, 20 nt, Artificial Sequence
  HTT spacer sequence GTCN PAM
aagauagacugguuuagaaa

SEQ ID NO: 26473 - RNA, 20 nt, Artificial Sequence
  HTT spacer sequence GTCN PAM
aucuuggaccaaaagagagg

SEQ ID NO: 26474 - RNA, 20 nt, Artificial Sequence
  HTT spacer sequence GTCN PAM
auguggcugaauuagagcug

SEQ ID NO: 26475 - RNA, 20 nt, Artificial Sequence
  HTT spacer sequence GTCN PAM
ggccuuguagccucaacacg

SEQ ID NO: 26476 - RNA, 20 nt, Artificial Sequence
  HTT spacer sequence GTCN PAM
uugaaaaucacggugagcaa

SEQ ID NO: 26477 - RNA, 20 nt, Artificial Sequence
  HTT spacer sequence GTCN PAM
ggauggcaggcagggaagag

SEQ ID NO: 26478 - RNA, 20 nt, Artificial Sequence
  HTT spacer sequence GTCN PAM
ggguggcaggagcugcugcc

SEQ ID NO: 26479 - RNA, 20 nt, Artificial Sequence
  HTT spacer sequence GTCN PAM
uggucgugggugguggagau

SEQ ID NO: 26480 - RNA, 20 nt, Artificial Sequence
  HTT spacer sequence GTCN PAM
ugggugguggagaugugcca

SEQ ID NO: 26481 - RNA, 20 nt, Artificial Sequence
  HTT spacer sequence GTCN PAM
uggcacaucuccaccaccca

SEQ ID NO: 26482 - RNA, 20 nt, Artificial Sequence
  HTT spacer sequence GTCN PAM
ugcagccauccccucugcca

SEQ ID NO: 26483 - RNA, 20 nt, Artificial Sequence
  HTT spacer sequence GTCN PAM
uuuccaaagcgucugugguu

SEQ ID NO: 26484 - RNA, 20 nt, Artificial Sequence
  HTT spacer sequence GTCN PAM
gugguuccacuuuuuggggc

SEQ ID NO: 26485 - RNA, 20 nt, Artificial Sequence
  HTT spacer sequence GTCN PAM
uuucuauaguaauaaaguug

SEQ ID NO: 26486 - RNA, 20 nt, Artificial Sequence
  HTT spacer sequence GTCN PAM
acuuuauuacuauagaaagg

SEQ ID NO: 26487 - RNA, 20 nt, Artificial Sequence
  HTT spacer sequence GTCN PAM
uuuccccaagcaugaacuug

SEQ ID NO: 26488 - RNA, 20 nt, Artificial Sequence
  HTT spacer sequence GTCN PAM
cuguguggcguggagaagag

SEQ ID NO: 26489 - RNA, 20 nt, Artificial Sequence
  HTT spacer sequence GTCN PAM
uagcugaacaagcccagccc

SEQ ID NO: 26490 - RNA, 20 nt, Artificial Sequence
  HTT spacer sequence GTCN PAM
ccgggcacuuggucccuuuc

SEQ ID NO: 26491 - RNA, 20 nt, Artificial Sequence
  HTT spacer sequence GTCN PAM
cuuucucuuccccugagucc

SEQ ID NO: 26492 - RNA, 20 nt, Artificial Sequence
  HTT spacer sequence GTCN PAM
cuuuggcuccccugugccac

SEQ ID NO: 26493 - RNA, 20 nt, Artificial Sequence
  HTT spacer sequence GTCN PAM
cagacugcugcucaucacua

SEQ ID NO: 26494 - RNA, 20 nt, Artificial Sequence
  HTT spacer sequence GTCN PAM
gagacagaaagaaggcagag

SEQ ID NO: 26495 - RNA, 20 nt, Artificial Sequence
  HTT spacer sequence GTCN PAM
cgaguagugaugagcagcag

SEQ ID NO: 26496 - RNA, 20 nt, Artificial Sequence
  HTT spacer sequence GTCN PAM
uuguuagguaaugguagcua

SEQ ID NO: 26497 - RNA, 20 nt, Artificial Sequence
  HTT spacer sequence GTCN PAM
uaaaaccaagaaacaaccuu

SEQ ID NO: 26498 - RNA, 20 nt, Artificial Sequence
  HTT spacer sequence GTCN PAM
ccgaauucccacauggagga

SEQ ID NO: 26499 - RNA, 20 nt, Artificial Sequence
  HTT spacer sequence GTCN PAM
gguuggggacaaggagaggg

SEQ ID NO: 26500 - RNA, 20 nt, Artificial Sequence
  HTT spacer sequence GTCN PAM
ccaaccagacacagaggaug

SEQ ID NO: 26501 - RNA, 20 nt, Artificial Sequence
  HTT spacer sequence GTCN PAM
cuuauccaaggccacaaagc

SEQ ID NO: 26502 - RNA, 20 nt, Artificial Sequence
  HTT spacer sequence GTCN PAM
ccacgagagaacaccagcaa

SEQ ID NO: 26503 - RNA, 20 nt, Artificial Sequence
  HTT spacer sequence GTCN PAM
cagccccacccuguaaaagg

SEQ ID NO: 26504 - RNA, 20 nt, Artificial Sequence
  HTT spacer sequence GTCN PAM
ccuuuuacaggguggggcug

SEQ ID NO: 26505 - RNA, 20 nt, Artificial Sequence
  HTT spacer sequence GTCN PAM
cucaguccccuuuuacaggg

SEQ ID NO: 26506 - RNA, 20 nt, Artificial Sequence
  HTT spacer sequence GTCN PAM
uccugcugcuucccagcagc

SEQ ID NO: 26507 - RNA, 20 nt, Artificial Sequence
  HTT spacer sequence GTCN PAM
ugcugcuucccagcagcagc

SEQ ID NO: 26508 - RNA, 20 nt, Artificial Sequence
  HTT spacer sequence GTCN PAM
cugauguguuuucugugagg

SEQ ID NO: 26509 - RNA, 20 nt, Artificial Sequence
  HTT spacer sequence GTCN PAM
gggaaacccuuggaaggagg

SEQ ID NO: 26510 - RNA, 20 nt, Artificial Sequence
  HTT spacer sequence GTCN PAM
ccuccuuccaaggguuuccc

SEQ ID NO: 26511 - RNA, 20 nt, Artificial Sequence
  HTT spacer sequence GTCN PAM
ccaugggauuagugguggcu

SEQ ID NO: 26512 - RNA, 20 nt, Artificial Sequence
  HTT spacer sequence GTCN PAM
gccuugcucuccgcagagag

SEQ ID NO: 26513 - RNA, 20 nt, Artificial Sequence
  HTT spacer sequence GTCN PAM
aguuguuccucccuccaccu

SEQ ID NO: 26514 - RNA, 20 nt, Artificial Sequence
  HTT spacer sequence GTCN PAM
cuuccagguggagggaggaa

SEQ ID NO: 26515 - RNA, 20 nt, Artificial Sequence
  HTT spacer sequence GTCN PAM
ccuguuccgcugggauguua

SEQ ID NO: 26516 - RNA, 20 nt, Artificial Sequence
  HTT spacer sequence GTCN PAM
ccaaguucauccucauccuc

SEQ ID NO: 26517 - RNA, 20 nt, Artificial Sequence
  HTT spacer sequence GTCN PAM
gcuuccugacgccacauccu

SEQ ID NO: 26518 - RNA, 20 nt, Artificial Sequence
  HTT spacer sequence GTCN PAM
ggaagcagacauaagagggg

SEQ ID NO: 26519 - RNA, 20 nt, Artificial Sequence
  HTT spacer sequence GTCN PAM
cagguuccugaguagcuggg

SEQ ID NO: 26520 - RNA, 20 nt, Artificial Sequence
  HTT spacer sequence GTCN PAM
ggucaaacagagugagaccc

SEQ ID NO: 26521 - RNA, 20 nt, Artificial Sequence
  HTT spacer sequence GTCN PAM
aacagagugagacccugucu

SEQ ID NO: 26522 - RNA, 20 nt, Artificial Sequence
  HTT spacer sequence GTCN PAM
cacucuguuugaccagacug

SEQ ID NO: 26523 - RNA, 20 nt, Artificial Sequence
  HTT spacer sequence GTCN PAM
gaaaaaaaaaaaaaaaucca

SEQ ID NO: 26524 - RNA, 20 nt, Artificial Sequence
  HTT spacer sequence GTCN PAM
uaccuuuccuuuccugccug

SEQ ID NO: 26525 - RNA, 20 nt, Artificial Sequence
  HTT spacer sequence GTCN PAM
cucccucuguguacacucca

SEQ ID NO: 26526 - RNA, 20 nt, Artificial Sequence
  HTT spacer sequence GTCN PAM
cucucauccuaggcccucca

SEQ ID NO: 26527 - RNA, 20 nt, Artificial Sequence
  HTT spacer sequence GTCN PAM
cucaguagcuuguggggucu

SEQ ID NO: 26528 - RNA, 20 nt, Artificial Sequence
  HTT spacer sequence GTCN PAM
ucucugucuagccacuuaau

SEQ ID NO: 26529 - RNA, 20 nt, Artificial Sequence
  HTT spacer sequence GTCN PAM
agccacuuaauugauugugu

SEQ ID NO: 26530 - RNA, 20 nt, Artificial Sequence
  HTT spacer sequence GTCN PAM
auggucucucguuacuguuu

SEQ ID NO: 26531 - RNA, 20 nt, Artificial Sequence
  HTT spacer sequence GTCN PAM
cucguuacuguuuucucugu

SEQ ID NO: 26532 - RNA, 20 nt, Artificial Sequence
  HTT spacer sequence GTCN PAM
auccccuuugugaccuuggc

SEQ ID NO: 26533 - RNA, 20 nt, Artificial Sequence
  HTT spacer sequence GTCN PAM
caaaggggauggaccuacca

SEQ ID NO: 26534 - RNA, 20 nt, Artificial Sequence
  HTT spacer sequence GTCN PAM
augagagcaacagccaaggu

SEQ ID NO: 26535 - RNA, 20 nt, Artificial Sequence
  HTT spacer sequence GTCN PAM
uuguaguccuggcauccagc

SEQ ID NO: 26536 - RNA, 20 nt, Artificial Sequence
  HTT spacer sequence GTCN PAM
uggcauccagcuucucgaca

SEQ ID NO: 26537 - RNA, 20 nt, Artificial Sequence
  HTT spacer sequence GTCN PAM
agaagcuggaugccaggacu

SEQ ID NO: 26538 - RNA, 20 nt, Artificial Sequence
  HTT spacer sequence GTCN PAM
cgugucgagaagcuggaugc

SEQ ID NO: 26539 - RNA, 20 nt, Artificial Sequence
  HTT spacer sequence GTCN PAM
ugccaguaccucagacuugc

SEQ ID NO: 26540 - RNA, 20 nt, Artificial Sequence
  HTT spacer sequence GTCN PAM
gagguacuggcaggacaagu

SEQ ID NO: 26541 - RNA, 20 nt, Artificial Sequence
  HTT spacer sequence GTCN PAM
cucuccagggccucuucuug

SEQ ID NO: 26542 - RNA, 20 nt, Artificial Sequence
  HTT spacer sequence GTCN PAM
gucucaucuuccaccugaac

SEQ ID NO: 26543 - RNA, 20 nt, Artificial Sequence
  HTT spacer sequence GTCN PAM
caucuuccaccugaacuucc

SEQ ID NO: 26544 - RNA, 20 nt, Artificial Sequence
  HTT spacer sequence GTCN PAM
cccagguaguagacaguaga

SEQ ID NO: 26545 - RNA, 20 nt, Artificial Sequence
  HTT spacer sequence GTCN PAM
acuaccugggugaccuugga

SEQ ID NO: 26546 - RNA, 20 nt, Artificial Sequence
  HTT spacer sequence GTCN PAM
gauucagagccuguguugac

SEQ ID NO: 26547 - RNA, 20 nt, Artificial Sequence
  HTT spacer sequence GTCN PAM
acacaggcucugaaucagac

SEQ ID NO: 26548 - RNA, 20 nt, Artificial Sequence
  HTT spacer sequence GTCN PAM
gucccugcacgugcucugug

SEQ ID NO: 26549 - RNA, 20 nt, Artificial Sequence
  HTT spacer sequence GTCN PAM
cugcacgugcucuguggccu

SEQ ID NO: 26550 - RNA, 20 nt, Artificial Sequence
  HTT spacer sequence GTCN PAM
ccuccagcccauucugcacu

SEQ ID NO: 26551 - RNA, 20 nt, Artificial Sequence
  HTT spacer sequence GTCN PAM
gcauuguccccuccagccca

SEQ ID NO: 26552 - RNA, 20 nt, Artificial Sequence
  HTT spacer sequence GTCN PAM
cuggcuccuccagguuuccu

SEQ ID NO: 26553 - RNA, 20 nt, Artificial Sequence
  HTT spacer sequence GTCN PAM
ugaccuggucugcauucucu

SEQ ID NO: 26554 - RNA, 20 nt, Artificial Sequence
  HTT spacer sequence GTCN PAM
cgacgaggaguucuaaugcc

SEQ ID NO: 26555 - RNA, 20 nt, Artificial Sequence
  HTT spacer sequence GTCN PAM
gcauucucugagugugcugc

SEQ ID NO: 26556 - RNA, 20 nt, Artificial Sequence
  HTT spacer sequence GTCN PAM
cagguuauaguuuaaggcau

SEQ ID NO: 26557 - RNA, 20 nt, Artificial Sequence
  HTT spacer sequence GTCN PAM
uaaaacagguaaaaacagag

SEQ ID NO: 26558 - RNA, 20 nt, Artificial Sequence
  HTT spacer sequence GTCN PAM
cgcuccauugcccaggcuag

SEQ ID NO: 26559 - RNA, 20 nt, Artificial Sequence
  HTT spacer sequence GTCN PAM
ccacuaaaaauacaaaaauu

SEQ ID NO: 26560 - RNA, 20 nt, Artificial Sequence
  HTT spacer sequence GTCN PAM
ggcuggucucgaacuccuga

SEQ ID NO: 26561 - RNA, 20 nt, Artificial Sequence
  HTT spacer sequence GTCN PAM
cgaacuccugaccucaagug

SEQ ID NO: 26562 - RNA, 20 nt, Artificial Sequence
  HTT spacer sequence GTCN PAM
ggaguucgagaccagccuga

SEQ ID NO: 26563 - RNA, 20 nt, Artificial Sequence
  HTT spacer sequence GTCN PAM
ugcugccucucccugcuggg

SEQ ID NO: 26564 - RNA, 20 nt, Artificial Sequence
  HTT spacer sequence GTCN PAM
cugugccuuugaccuuguuu

SEQ ID NO: 26565 - RNA, 20 nt, Artificial Sequence
  HTT spacer sequence GTCN PAM
aaggcacagagacaugcaca

SEQ ID NO: 26566 - RNA, 20 nt, Artificial Sequence
  HTT spacer sequence GTCN PAM
ugauuccuggagcccugaga

SEQ ID NO: 26567 - RNA, 20 nt, Artificial Sequence
  HTT spacer sequence GTCN PAM
gccuccccacacacaaugcu

SEQ ID NO: 26568 - RNA, 20 nt, Artificial Sequence
  HTT spacer sequence GTCN PAM
ggugucaggagccugcagag

SEQ ID NO: 26569 - RNA, 20 nt, Artificial Sequence
  HTT spacer sequence GTCN PAM
ggagccugcagagggcacac

SEQ ID NO: 26570 - RNA, 20 nt, Artificial Sequence
  HTT spacer sequence GTCN PAM
aggcucugugugcccucugc

SEQ ID NO: 26571 - RNA, 20 nt, Artificial Sequence
  HTT spacer sequence GTCN PAM
ugcuuucucaccuggccucc

SEQ ID NO: 26572 - RNA, 20 nt, Artificial Sequence
  HTT spacer sequence GTCN PAM
cucaguccuuagcaagccca

SEQ ID NO: 26573 - RNA, 20 nt, Artificial Sequence
  HTT spacer sequence GTCN PAM
uuagcaagcccaggagcugu

SEQ ID NO: 26574 - RNA, 20 nt, Artificial Sequence
  HTT spacer sequence GTCN PAM
ugugggggccccgcuguggc

SEQ ID NO: 26575 - RNA, 20 nt, Artificial Sequence
  HTT spacer sequence GTCN PAM
gggaacacucagcgccucga

SEQ ID NO: 26576 - RNA, 20 nt, Artificial Sequence
  HTT spacer sequence GTCN PAM
gaacacagcuccuggagaag

SEQ ID NO: 26577 - RNA, 20 nt, Artificial Sequence
  HTT spacer sequence GTCN PAM
gcaaugccaagcccuccagg

SEQ ID NO: 26578 - RNA, 20 nt, Artificial Sequence
  HTT spacer sequence GTCN PAM
acagugagagaggaggaaug

SEQ ID NO: 26579 - RNA, 20 nt, Artificial Sequence
  HTT spacer sequence GTCN PAM
accuccacauuggucggcaa

SEQ ID NO: 26580 - RNA, 20 nt, Artificial Sequence
  HTT spacer sequence GTCN PAM
agaaagcuagcauuccuccu

SEQ ID NO: 26581 - RNA, 20 nt, Artificial Sequence
  HTT spacer sequence GTCN PAM
auuaaauaagugggauauug

SEQ ID NO: 26582 - RNA, 20 nt, Artificial Sequence
  HTT spacer sequence GTCN PAM
ugaacuccugagcucgugau

SEQ ID NO: 26583 - RNA, 20 nt, Artificial Sequence
  HTT spacer sequence GTCN PAM
cccauacuuacguauucaga

SEQ ID NO: 26584 - RNA, 20 nt, Artificial Sequence
  HTT spacer sequence GTCN PAM
ucucccauacuuacguauuc

SEQ ID NO: 26585 - RNA, 20 nt, Artificial Sequence
  HTT spacer sequence GTCN PAM
agugccacauggcuacgcga

SEQ ID NO: 26586 - RNA, 20 nt, Artificial Sequence
  HTT spacer sequence GTCN PAM
uugcuuucaucucgguccag

SEQ ID NO: 26587 - RNA, 20 nt, Artificial Sequence
  HTT spacer sequence GTCN PAM
aggguguagaaacugccgcc

SEQ ID NO: 26588 - RNA, 20 nt, Artificial Sequence
  HTT spacer sequence GTCN PAM
gauacugcugcuugucaacc

SEQ ID NO: 26589 - RNA, 20 nt, Artificial Sequence
  HTT spacer sequence GTCN PAM
accacaccgacuaccgcugg

SEQ ID NO: 26590 - RNA, 20 nt, Artificial Sequence
  HTT spacer sequence GTCN PAM
gugugguugacaagcagcag

SEQ ID NO: 26591 - RNA, 20 nt, Artificial Sequence
  HTT spacer sequence GTCN PAM
gcugcacuucugcccaccag

SEQ ID NO: 26592 - RNA, 20 nt, Artificial Sequence
  HTT spacer sequence GTCN PAM
ugagacucccaguaaccuga

SEQ ID NO: 26593 - RNA, 20 nt, Artificial Sequence
  HTT spacer sequence GTCN PAM
caggacagggugcugggcug

SEQ ID NO: 26594 - RNA, 20 nt, Artificial Sequence
  HTT spacer sequence GTCN PAM
augaaaggaauauuaauaug

SEQ ID NO: 26595 - RNA, 20 nt, Artificial Sequence
  HTT spacer sequence GTCN PAM
caauaauaugcuguccauga

SEQ ID NO: 26596 - RNA, 20 nt, Artificial Sequence
  HTT spacer sequence GTCN PAM
agcuaaaggcauucaaaaua

SEQ ID NO: 26597 - RNA, 20 nt, Artificial Sequence
  HTT spacer sequence GTCN PAM
aagaaccugccaaagaaaau

SEQ ID NO: 26598 - RNA, 20 nt, Artificial Sequence
  HTT spacer sequence GTCN PAM
ugcucuguggcuccuacuaa

SEQ ID NO: 26599 - RNA, 20 nt, Artificial Sequence
  HTT spacer sequence GTCN PAM
uuaaauugguuccauagcca

SEQ ID NO: 26600 - RNA, 20 nt, Artificial Sequence
  HTT spacer sequence GTCN PAM
ggcuauggaaccaauuuaag

SEQ ID NO: 26601 - RNA, 20 nt, Artificial Sequence
  HTT spacer sequence GTCN PAM
uaaccucauuauaaaguaaa

SEQ ID NO: 26602 - RNA, 20 nt, Artificial Sequence
  HTT spacer sequence GTCN PAM
cagcuuuuauuuccauacau

SEQ ID NO: 26603 - RNA, 20 nt, Artificial Sequence
  HTT spacer sequence GTCN PAM
ccagaacuucuuuuccccag

SEQ ID NO: 26604 - RNA, 20 nt, Artificial Sequence
  HTT spacer sequence GTCN PAM
aguauccauacugagcagag

SEQ ID NO: 26605 - RNA, 20 nt, Artificial Sequence
  HTT spacer sequence GTCN PAM
acuguugggaggcauucuua

SEQ ID NO: 26606 - RNA, 20 nt, Artificial Sequence
  HTT spacer sequence GTCN PAM
ggucauucuguuggaggaga

SEQ ID NO: 26607 - RNA, 20 nt, Artificial Sequence
  HTT spacer sequence GTCN PAM
uucuguuggaggagacagac

SEQ ID NO: 26608 - RNA, 20 nt, Artificial Sequence
  HTT spacer sequence GTCN PAM
ccuccaacagaaugaccaga

SEQ ID NO: 26609 - RNA, 20 nt, Artificial Sequence
  HTT spacer sequence GTCN PAM
gucuccuccaacagaaugac

SEQ ID NO: 26610 - RNA, 20 nt, Artificial Sequence
  HTT spacer sequence GTCN PAM
cuggucugucuccuccaaca

SEQ ID NO: 26611 - RNA, 20 nt, Artificial Sequence
  HTT spacer sequence GTCN PAM
ucacuggucugucuccucca

SEQ ID NO: 26612 - RNA, 20 nt, Artificial Sequence
  HTT spacer sequence GTCN PAM
uaggccuguuacgaugacug

SEQ ID NO: 26613 - RNA, 20 nt, Artificial Sequence
  HTT spacer sequence GTCN PAM
ucguaacaggccuaagacau

SEQ ID NO: 26614 - RNA, 20 nt, Artificial Sequence
  HTT spacer sequence GTCN PAM
ccugcccccacagugcucag

SEQ ID NO: 26615 - RNA, 20 nt, Artificial Sequence
  HTT spacer sequence GTCN PAM
gugucuccuaguucugugcu

SEQ ID NO: 26616 - RNA, 20 nt, Artificial Sequence
  HTT spacer sequence GTCN PAM
ccuaguucugugcugcuuua

SEQ ID NO: 26617 - RNA, 20 nt, Artificial Sequence
  HTT spacer sequence GTCN PAM
gaaaaggagugaucugcuga

SEQ ID NO: 26618 - RNA, 20 nt, Artificial Sequence
  HTT spacer sequence GTCN PAM
ccugaauuggaguaacagaa

SEQ ID NO: 26619 - RNA, 20 nt, Artificial Sequence
  HTT spacer sequence GTCN PAM
ucauucagcccucugagggc

SEQ ID NO: 26620 - RNA, 20 nt, Artificial Sequence
  HTT spacer sequence GTCN PAM
cagaauuuaccuacauuuac

SEQ ID NO: 26621 - RNA, 20 nt, Artificial Sequence
  HTT spacer sequence GTCN PAM
cgaaacagucacagaauuua

SEQ ID NO: 26622 - RNA, 20 nt, Artificial Sequence
  HTT spacer sequence GTCN PAM
uggccucaggugaucugccc

SEQ ID NO: 26623 - RNA, 20 nt, Artificial Sequence
  HTT spacer sequence GTCN PAM
cgaaguccuggccucaggug

SEQ ID NO: 26624 - RNA, 20 nt, Artificial Sequence
  HTT spacer sequence GTCN PAM
cuacugaaaauaacaaaaau

SEQ ID NO: 26625 - RNA, 20 nt, Artificial Sequence
  HTT spacer sequence GTCN PAM
ccaugcucggcuaauuuuug

SEQ ID NO: 26626 - RNA, 20 nt, Artificial Sequence
  HTT spacer sequence GTCN PAM
cugcuacucagaaggcugag

SEQ ID NO: 26627 - RNA, 20 nt, Artificial Sequence
  HTT spacer sequence GTCN PAM
cccaggcuagagugcagugg

SEQ ID NO: 26628 - RNA, 20 nt, Artificial Sequence
  HTT spacer sequence GTCN PAM
cacucugucacccaggcuag

SEQ ID NO: 26629 - RNA, 20 nt, Artificial Sequence
  HTT spacer sequence GTCN PAM
aagguguccccgugguggaa

SEQ ID NO: 26630 - RNA, 20 nt, Artificial Sequence
  HTT spacer sequence GTCN PAM
ccgugguggaaggaaaaaau

SEQ ID NO: 26631 - RNA, 20 nt, Artificial Sequence
  HTT spacer sequence GTCN PAM
aagaugcccauagagagcag

SEQ ID NO: 26632 - RNA, 20 nt, Artificial Sequence
  HTT spacer sequence GTCN PAM
auggcuaaaaaaagagcagc

SEQ ID NO: 26633 - RNA, 20 nt, Artificial Sequence
  HTT spacer sequence GTCN PAM
agaguaagcagcaggaauuu

SEQ ID NO: 26634 - RNA, 20 nt, Artificial Sequence
  HTT spacer sequence GTCN PAM
ccuggagccagcucccaucu

SEQ ID NO: 26635 - RNA, 20 nt, Artificial Sequence
  HTT spacer sequence GTCN PAM
uuauguggguccugcccuag

SEQ ID NO: 26636 - RNA, 20 nt, Artificial Sequence
  HTT spacer sequence GTCN PAM
ugcccuagccuagccccucu

SEQ ID NO: 26637 - RNA, 20 nt, Artificial Sequence
  HTT spacer sequence GTCN PAM
auaagagaggggcuaggcua

SEQ ID NO: 26638 - RNA, 20 nt, Artificial Sequence
  HTT spacer sequence GTCN PAM
cuguggguuuaugauucacu

SEQ ID NO: 26639 - RNA, 20 nt, Artificial Sequence
  HTT spacer sequence GTCN PAM
uaccucuuggugaacuguua

SEQ ID NO: 26640 - RNA, 20 nt, Artificial Sequence
  HTT spacer sequence GTCN PAM
ugccuauacuuuggcgcuug

SEQ ID NO: 26641 - RNA, 20 nt, Artificial Sequence
  HTT spacer sequence GTCN PAM
cuucccagcucaucuuguuc

SEQ ID NO: 26642 - RNA, 20 nt, Artificial Sequence
  HTT spacer sequence GTCN PAM
cccuagauuugggacauuca

SEQ ID NO: 26643 - RNA, 20 nt, Artificial Sequence
  HTT spacer sequence GTCN PAM
caaaucuagggugacucaga

SEQ ID NO: 26644 - RNA, 20 nt, Artificial Sequence
  HTT spacer sequence GTCN PAM
acucaaauucagccccaauu

SEQ ID NO: 26645 - RNA, 20 nt, Artificial Sequence
  HTT spacer sequence GTCN PAM
acugucaacucaaauucagc

SEQ ID NO: 26646 - RNA, 20 nt, Artificial Sequence
  HTT spacer sequence GTCN PAM
acugcucauauuugaauugc

SEQ ID NO: 26647 - RNA, 20 nt, Artificial Sequence
  HTT spacer sequence GTCN PAM
cacugcgcuggcaggacggc

SEQ ID NO: 26648 - RNA, 20 nt, Artificial Sequence
  HTT spacer sequence GTCN PAM
ugccagcgcagugugacuua

SEQ ID NO: 26649 - RNA, 20 nt, Artificial Sequence
  HTT spacer sequence GTCN PAM
augugaaaacuaacgaacag

SEQ ID NO: 26650 - RNA, 20 nt, Artificial Sequence
  HTT spacer sequence GTCN PAM
guaacagccccccuccccca

SEQ ID NO: 26651 - RNA, 20 nt, Artificial Sequence
  HTT spacer sequence GTCN PAM
cuucaaacaguucccucuuc

SEQ ID NO: 26652 - RNA, 20 nt, Artificial Sequence
  HTT spacer sequence GTCN PAM
aaccaccaauccgugcucug

SEQ ID NO: 26653 - RNA, 20 nt, Artificial Sequence
  HTT spacer sequence GTCN PAM
cucuguucagcccauugcag

SEQ ID NO: 26654 - RNA, 20 nt, Artificial Sequence
  HTT spacer sequence GTCN PAM
uccucccacuucagccucuc

SEQ ID NO: 26655 - RNA, 20 nt, Artificial Sequence
  HTT spacer sequence GTCN PAM
ugaacucccagccucaaguc

SEQ ID NO: 26656 - RNA, 20 nt, Artificial Sequence
  HTT spacer sequence GTCN PAM
ugcuaggcagcccaggcuag

SEQ ID NO: 26657 - RNA, 20 nt, Artificial Sequence
  HTT spacer sequence GTCN PAM
cuguaguucagcugcuuggg

SEQ ID NO: 26658 - RNA, 20 nt, Artificial Sequence
  HTT spacer sequence GTCN PAM
ccuaggcuggagcacagugg

SEQ ID NO: 26659 - RNA, 20 nt, Artificial Sequence
  HTT spacer sequence GTCN PAM
ugcugugucaccuaggcugg

SEQ ID NO: 26660 - RNA, 20 nt, Artificial Sequence
  HTT spacer sequence GTCN PAM
cuggggaaaaaagaaagaaa

SEQ ID NO: 26661 - RNA, 20 nt, Artificial Sequence
  HTT spacer sequence GTCN PAM
ggccccuuucggugagcagu

SEQ ID NO: 26662 - RNA, 20 nt, Artificial Sequence
  HTT spacer sequence GTCN PAM
aaaguucugucgcguguugc

SEQ ID NO: 26663 - RNA, 20 nt, Artificial Sequence
  HTT spacer sequence GTCN PAM
cguguugcccacgcgucggu

SEQ ID NO: 26664 - RNA, 20 nt, Artificial Sequence
  HTT spacer sequence GTCN PAM
guggcucgcuccuugcaacu

SEQ ID NO: 26665 - RNA, 20 nt, Artificial Sequence
  HTT spacer sequence GTCN PAM
caucaagcuaagaauauucu

SEQ ID NO: 26666 - RNA, 20 nt, Artificial Sequence
  HTT spacer sequence GTCN PAM
ccguuaaggcccuuugccgc

SEQ ID NO: 26667 - RNA, 20 nt, Artificial Sequence
  HTT spacer sequence GTCN PAM
uucccauugcggcaaagggc

SEQ ID NO: 26668 - RNA, 20 nt, Artificial Sequence
  HTT spacer sequence GTCN PAM
cucggucagacccugaaggu

SEQ ID NO: 26669 - RNA, 20 nt, Artificial Sequence
  HTT spacer sequence GTCN PAM
gacccugaaggucagagggg

SEQ ID NO: 26670 - RNA, 20 nt, Artificial Sequence
  HTT spacer sequence GTCN PAM
gaccgagcgacguccuuccc

SEQ ID NO: 26671 - RNA, 20 nt, Artificial Sequence
  HTT spacer sequence GTCN PAM
gaggggcaguuugggagugu

SEQ ID NO: 26672 - RNA, 20 nt, Artificial Sequence
  HTT spacer sequence GTCN PAM
acauuuuaacuguauggacu

SEQ ID NO: 26673 - RNA, 20 nt, Artificial Sequence
  HTT spacer sequence GTCN PAM
auacaguuaaaauguugaca

SEQ ID NO: 26674 - RNA, 20 nt, Artificial Sequence
  HTT spacer sequence GTCN PAM
caagguuuauaauucccacg

SEQ ID NO: 26675 - RNA, 20 nt, Artificial Sequence
  HTT spacer sequence GTCN PAM
guguagagugaaauaaccug

SEQ ID NO: 26676 - RNA, 20 nt, Artificial Sequence
  HTT spacer sequence GTCN PAM
guuuuagaacuagaauuaaa

SEQ ID NO: 26677 - RNA, 20 nt, Artificial Sequence
  HTT spacer sequence GTCN PAM
augcaucuguugcuccuucu

SEQ ID NO: 26678 - RNA, 20 nt, Artificial Sequence
  HTT spacer sequence GTCN PAM
ucuagaaggagcaacagaug

SEQ ID NO: 26679 - RNA, 20 nt, Artificial Sequence
  HTT spacer sequence GTCN PAM
guccagcacaaaguuacuua

SEQ ID NO: 26680 - RNA, 20 nt, Artificial Sequence
  HTT spacer sequence GTCN PAM
agcacaaaguuacuuagucc

SEQ ID NO: 26681 - RNA, 20 nt, Artificial Sequence
  HTT spacer sequence GTCN PAM
ccagaugucuggagaagagg

SEQ ID NO: 26682 - RNA, 20 nt, Artificial Sequence
  HTT spacer sequence GTCN PAM
ggagaagaggaggauucuga

SEQ ID NO: 26683 - RNA, 20 nt, Artificial Sequence
  HTT spacer sequence GTCN PAM
gaauccuccucuucuccaga

SEQ ID NO: 26684 - RNA, 20 nt, Artificial Sequence
  HTT spacer sequence GTCN PAM
uaaguuugaaaugccuguaa

SEQ ID NO: 26685 - RNA, 20 nt, Artificial Sequence
  HTT spacer sequence GTCN PAM
ccaccucccucaaccccguu

SEQ ID NO: 26686 - RNA, 20 nt, Artificial Sequence
  HTT spacer sequence GTCN PAM
ucuacacaggauguucuccu

SEQ ID NO: 26687 - RNA, 20 nt, Artificial Sequence
  HTT spacer sequence GTCN PAM
augcaagugucaucuacaca

SEQ ID NO: 26688 - RNA, 20 nt, Artificial Sequence
  HTT spacer sequence GTCN PAM
ggguuccagaggguccaugc

SEQ ID NO: 26689 - RNA, 20 nt, Artificial Sequence
  HTT spacer sequence GTCN PAM
ugccaagcuccaucgaaacu

SEQ ID NO: 26690 - RNA, 20 nt, Artificial Sequence
  HTT spacer sequence GTCN PAM
cagcagaaguaaacauucau

SEQ ID NO: 26691 - RNA, 20 nt, Artificial Sequence
  HTT spacer sequence GTCN PAM
ccaauuauaugucacagcag

SEQ ID NO: 26692 - RNA, 20 nt, Artificial Sequence
  HTT spacer sequence GTCN PAM
cuggauucuaaguuggacug

SEQ ID NO: 26693 - RNA, 20 nt, Artificial Sequence
  HTT spacer sequence GTCN PAM
aacuuagaauccagugacug

SEQ ID NO: 26694 - RNA, 20 nt, Artificial Sequence
  HTT spacer sequence GTCN PAM
gcugcaaaaacucucacagu

SEQ ID NO: 26695 - RNA, 20 nt, Artificial Sequence
  HTT spacer sequence GTCN PAM
augcacuuacuuuguuuuuu

SEQ ID NO: 26696 - RNA, 20 nt, Artificial Sequence
  HTT spacer sequence GTCN PAM
caaacuccugggcucaagug

SEQ ID NO: 26697 - RNA, 20 nt, Artificial Sequence
  HTT spacer sequence GTCN PAM
cacaccauagcccaggcuug

SEQ ID NO: 26698 - RNA, 20 nt, Artificial Sequence
  HTT spacer sequence GTCN PAM
cgaacucccaggcucaagcc

SEQ ID NO: 26699 - RNA, 20 nt, Artificial Sequence
  HTT spacer sequence GTCN PAM
cagccaccugagagacugag

SEQ ID NO: 26700 - RNA, 20 nt, Artificial Sequence
  HTT spacer sequence GTCN PAM
cucagguggcugggaccaca

SEQ ID NO: 26701 - RNA, 20 nt, Artificial Sequence
  HTT spacer sequence GTCN PAM
cagcucacugcagccucaaa

SEQ ID NO: 26702 - RNA, 20 nt, Artificial Sequence
  HTT spacer sequence GTCN PAM
cugcacuccggccuggguga

SEQ ID NO: 26703 - RNA, 20 nt, Artificial Sequence
  HTT spacer sequence GTCN PAM
cccaggccggagugcaguga

SEQ ID NO: 26704 - RNA, 20 nt, Artificial Sequence
  HTT spacer sequence GTCN PAM
cgccuugucacccaggccgg

SEQ ID NO: 26705 - RNA, 20 nt, Artificial Sequence
  HTT spacer sequence GTCN PAM
cauuuuaugauggauuccug

SEQ ID NO: 26706 - RNA, 20 nt, Artificial Sequence
  HTT spacer sequence GTCN PAM
agauuuaauacuuuuucuau

SEQ ID NO: 26707 - RNA, 20 nt, Artificial Sequence
  HTT spacer sequence GTCN PAM
caaacaugguaucuuauaga

SEQ ID NO: 26708 - RNA, 20 nt, Artificial Sequence
  HTT spacer sequence GTCN PAM
cauagcaaaacaguguuaaa

SEQ ID NO: 26709 - RNA, 20 nt, Artificial Sequence
  HTT spacer sequence GTCN PAM
gcuuccuuuucugauucaga

SEQ ID NO: 26710 - RNA, 20 nt, Artificial Sequence
  HTT spacer sequence GTCN PAM
cuaggauaacaccucuuuca

SEQ ID NO: 26711 - RNA, 20 nt, Artificial Sequence
  HTT spacer sequence GTCN PAM
ucaccagaaaaagucucuag

SEQ ID NO: 26712 - RNA, 20 nt, Artificial Sequence
  HTT spacer sequence GTCN PAM
cuuuuugcuuuacuuucucu

SEQ ID NO: 26713 - RNA, 20 nt, Artificial Sequence
  HTT spacer sequence GTCN PAM
gcacucaaaaagcuucagaa

SEQ ID NO: 26714 - RNA, 20 nt, Artificial Sequence
  HTT spacer sequence GTCN PAM
gaugaucccaaaugaaaaau

SEQ ID NO: 26715 - RNA, 20 nt, Artificial Sequence
  HTT spacer sequence GTCN PAM
aaacuguggcagugauaggg

SEQ ID NO: 26716 - RNA, 20 nt, Artificial Sequence
  HTT spacer sequence GTCN PAM
ucccagcgcaacgcugcccc

SEQ ID NO: 26717 - RNA, 20 nt, Artificial Sequence
  HTT spacer sequence GTCN PAM
uuugacccuuggccauuugu

SEQ ID NO: 26718 - RNA, 20 nt, Artificial Sequence
  HTT spacer sequence GTCN PAM
aaggacaaaggcaggccuca

SEQ ID NO: 26719 - RNA, 20 nt, Artificial Sequence
  HTT spacer sequence GTCN PAM
cugagagcuggacugcugua

SEQ ID NO: 26720 - RNA, 20 nt, Artificial Sequence
  HTT spacer sequence GTCN PAM
agcucucagagacacuaaca

SEQ ID NO: 26721 - RNA, 20 nt, Artificial Sequence
  HTT spacer sequence GTCN PAM
ccuccaaccacgcacugcgg

SEQ ID NO: 26722 - RNA, 20 nt, Artificial Sequence
  HTT spacer sequence GTCN PAM
cuucuuguguacuugaaaau

SEQ ID NO: 26723 - RNA, 20 nt, Artificial Sequence
  HTT spacer sequence GTCN PAM
gaaccuccaugacuccgagc

SEQ ID NO: 26724 - RNA, 20 nt, Artificial Sequence
  HTT spacer sequence GTCN PAM
uggagguucugacacuaagg

SEQ ID NO: 26725 - RNA, 20 nt, Artificial Sequence
  HTT spacer sequence GTCN PAM
uguacuggaggcucguggga

SEQ ID NO: 26726 - RNA, 20 nt, Artificial Sequence
  HTT spacer sequence GTCN PAM
cguugugaaaaccuuucaac

SEQ ID NO: 26727 - RNA, 20 nt, Artificial Sequence
  HTT spacer sequence GTCN PAM
ucauccugccgacuauugcc

SEQ ID NO: 26728 - RNA, 20 nt, Artificial Sequence
  HTT spacer sequence GTCN PAM
gcaggaugaagacguacagu

SEQ ID NO: 26729 - RNA, 20 nt, Artificial Sequence
  HTT spacer sequence GTCN PAM
ucuuuuguucuuuuccuucu

SEQ ID NO: 26730 - RNA, 20 nt, Artificial Sequence
  HTT spacer sequence GTCN PAM
ggagcugugcucacgcugua

SEQ ID NO: 26731 - RNA, 20 nt, Artificial Sequence
  HTT spacer sequence GTCN PAM
acauacagcgugagcacagc

SEQ ID NO: 26732 - RNA, 20 nt, Artificial Sequence
  HTT spacer sequence GTCN PAM
acauccuugcuugucgccgg

SEQ ID NO: 26733 - RNA, 20 nt, Artificial Sequence
  HTT spacer sequence GTCN PAM
accaugcgagccagcacacg

SEQ ID NO: 26734 - RNA, 20 nt, Artificial Sequence
  HTT spacer sequence GTCN PAM
ccggguagaaaugcuucugg

SEQ ID NO: 26735 - RNA, 20 nt, Artificial Sequence
  HTT spacer sequence GTCN PAM
ugacauggucaccgauagaa

SEQ ID NO: 26736 - RNA, 20 nt, Artificial Sequence
  HTT spacer sequence GTCN PAM
agaccauacuuacggaggaa

SEQ ID NO: 26737 - RNA, 20 nt, Artificial Sequence
  HTT spacer sequence GTCN PAM
ccgauagaaacauggaaaca

SEQ ID NO: 26738 - RNA, 20 nt, Artificial Sequence
  HTT spacer sequence GTCN PAM
gaucugacuguuucuuguau

SEQ ID NO: 26739 - RNA, 20 nt, Artificial Sequence
  HTT spacer sequence GTCN PAM
gaucggacacacgaguaacg

SEQ ID NO: 26740 - RNA, 20 nt, Artificial Sequence
  HTT spacer sequence GTCN PAM
gcccuuacuaggaugaacug

SEQ ID NO: 26741 - RNA, 20 nt, Artificial Sequence
  HTT spacer sequence GTCN PAM
auuagagcagcauggcccag

SEQ ID NO: 26742 - RNA, 20 nt, Artificial Sequence
  HTT spacer sequence GTCN PAM
uccuuguguuaggacaaccc

SEQ ID NO: 26743 - RNA, 20 nt, Artificial Sequence
  HTT spacer sequence GTCN PAM
uuguguuaggacaacccagg

SEQ ID NO: 26744 - RNA, 20 nt, Artificial Sequence
  HTT spacer sequence GTCN PAM
uaacacaaggacgaccugug

SEQ ID NO: 26745 - RNA, 20 nt, Artificial Sequence
  HTT spacer sequence GTCN PAM
ugugaauuuauucccguaca

SEQ ID NO: 26746 - RNA, 20 nt, Artificial Sequence
  HTT spacer sequence GTCN PAM
uccuuuacucuuuagaaagu

SEQ ID NO: 26747 - RNA, 20 nt, Artificial Sequence
  HTT spacer sequence GTCN PAM
gugacgugaguggaggcagu

SEQ ID NO: 26748 - RNA, 20 nt, Artificial Sequence
  HTT spacer sequence GTCN PAM
cagacgugauccugccgguc

SEQ ID NO: 26749 - RNA, 20 nt, Artificial Sequence
  HTT spacer sequence GTCN PAM
ugugaugagugggaaaauag

SEQ ID NO: 26750 - RNA, 20 nt, Artificial Sequence
  HTT spacer sequence GTCN PAM
ucuaauugcuaaacaagagu

SEQ ID NO: 26751 - RNA, 20 nt, Artificial Sequence
  HTT spacer sequence GTCN PAM
cucagauuugccaacucuug

SEQ ID NO: 26752 - RNA, 20 nt, Artificial Sequence
  HTT spacer sequence GTCN PAM
ugcaugccaaggauugagua

SEQ ID NO: 26753 - RNA, 20 nt, Artificial Sequence
  HTT spacer sequence GTCN PAM
ucaaagcauuuaaucauuua

SEQ ID NO: 26754 - RNA, 20 nt, Artificial Sequence
  HTT spacer sequence GTCN PAM
uugagaagccuuugucagaa

SEQ ID NO: 26755 - RNA, 20 nt, Artificial Sequence
  HTT spacer sequence GTCN PAM
gaaaucccuacaucuccuau

SEQ ID NO: 26756 - RNA, 20 nt, Artificial Sequence
  HTT spacer sequence GTCN PAM
uggaaauacacucacauagg

SEQ ID NO: 26757 - RNA, 20 nt, Artificial Sequence
  HTT spacer sequence GTCN PAM
cucucucccucucacacaca

SEQ ID NO: 26758 - RNA, 20 nt, Artificial Sequence
  HTT spacer sequence GTCN PAM
uuagaguaccuugucuauua

SEQ ID NO: 26759 - RNA, 20 nt, Artificial Sequence
  HTT spacer sequence GTCN PAM
auuaugcuuuucagucuuua

SEQ ID NO: 26760 - RNA, 20 nt, Artificial Sequence
  HTT spacer sequence GTCN PAM
uuagaguaccuuguugaugg

SEQ ID NO: 26761 - RNA, 20 nt, Artificial Sequence
  HTT spacer sequence GTCN PAM
accuaauugugcccaauccc

SEQ ID NO: 26762 - RNA, 20 nt, Artificial Sequence
  HTT spacer sequence GTCN PAM
guagggccaagcucuuuugu

SEQ ID NO: 26763 - RNA, 20 nt, Artificial Sequence
  HTT spacer sequence GTCN PAM
cucucauagcagauggcggg

SEQ ID NO: 26764 - RNA, 20 nt, Artificial Sequence
  HTT spacer sequence GTCN PAM
aaaaguaauaauaguuuauc

SEQ ID NO: 26765 - RNA, 20 nt, Artificial Sequence
  HTT spacer sequence GTCN PAM
agggucaaaaaguaauaaua

SEQ ID NO: 26766 - RNA, 20 nt, Artificial Sequence
  HTT spacer sequence GTCN PAM
ucaguccagaugagggagau

SEQ ID NO: 26767 - RNA, 20 nt, Artificial Sequence
  HTT spacer sequence GTCN PAM
agaugagggagauuaaaaga

SEQ ID NO: 26768 - RNA, 20 nt, Artificial Sequence
  HTT spacer sequence GTCN PAM
uuucaaaauaaaaucaccuc

SEQ ID NO: 26769 - RNA, 20 nt, Artificial Sequence
  HTT spacer sequence GTCN PAM
uacugggauauuugauagug

SEQ ID NO: 26770 - RNA, 20 nt, Artificial Sequence
  HTT spacer sequence GTCN PAM
uagaugaucuguuuuacauu

SEQ ID NO: 26771 - RNA, 20 nt, Artificial Sequence
  HTT spacer sequence GTCN PAM
ugauacaaaugcaggcccua

SEQ ID NO: 26772 - RNA, 20 nt, Artificial Sequence
  HTT spacer sequence GTCN PAM
aaacucugcacacuaggauu

SEQ ID NO: 26773 - RNA, 20 nt, Artificial Sequence
  HTT spacer sequence GTCN PAM
uagucuaaacucugcacacu

SEQ ID NO: 26774 - RNA, 20 nt, Artificial Sequence
  HTT spacer sequence GTCN PAM
aaaauacaaauaaaaaugaa

SEQ ID NO: 26775 - RNA, 20 nt, Artificial Sequence
  HTT spacer sequence GTCN PAM
agcagggaauagagccuuug

SEQ ID NO: 26776 - RNA, 20 nt, Artificial Sequence
  HTT spacer sequence GTCN PAM
cuccaccaugcaagacucac

SEQ ID NO: 26777 - RNA, 20 nt, Artificial Sequence
  HTT spacer sequence GTCN PAM
ugcaugguggagagacgaaa

SEQ ID NO: 26778 - RNA, 20 nt, Artificial Sequence
  HTT spacer sequence GTCN PAM
cucuccuccagucucuuccc

SEQ ID NO: 26779 - RNA, 20 nt, Artificial Sequence
  HTT spacer sequence GTCN PAM
cuucccacccgcuggacggg

SEQ ID NO: 26780 - RNA, 20 nt, Artificial Sequence
  HTT spacer sequence GTCN PAM
agcgggugggaagagacugg

SEQ ID NO: 26781 - RNA, 20 nt, Artificial Sequence
  HTT spacer sequence GTCN PAM
cuggaaacagugaguccgga

SEQ ID NO: 26782 - RNA, 20 nt, Artificial Sequence
  HTT spacer sequence GTCN PAM
ggacaaaguaaguguccagc

SEQ ID NO: 26783 - RNA, 20 nt, Artificial Sequence
  HTT spacer sequence GTCN PAM
ggacucacuguuuccaguga

SEQ ID NO: 26784 - RNA, 20 nt, Artificial Sequence
  HTT spacer sequence GTCN PAM
agcgugucugcaugggaggc

SEQ ID NO: 26785 - RNA, 20 nt, Artificial Sequence
  HTT spacer sequence GTCN PAM
gcaugggaggcacagggcgc

SEQ ID NO: 26786 - RNA, 20 nt, Artificial Sequence
  HTT spacer sequence GTCN PAM
ccuguggcagauacagagag

SEQ ID NO: 26787 - RNA, 20 nt, Artificial Sequence
  HTT spacer sequence GTCN PAM
acggcaccuccucugcacuc

SEQ ID NO: 26788 - RNA, 20 nt, Artificial Sequence
  HTT spacer sequence GTCN PAM
cuaaccacagcuucacugag

SEQ ID NO: 26789 - RNA, 20 nt, Artificial Sequence
  HTT spacer sequence GTCN PAM
gagggagccaagcagugcug

SEQ ID NO: 26790 - RNA, 20 nt, Artificial Sequence
  HTT spacer sequence GTCN PAM
cacaucagcacugcuuggcu

SEQ ID NO: 26791 - RNA, 20 nt, Artificial Sequence
  HTT spacer sequence GTCN PAM
gccguggccugcaggccccu

SEQ ID NO: 26792 - RNA, 20 nt, Artificial Sequence
  HTT spacer sequence GTCN PAM
ggggccugcaggccacggcc

SEQ ID NO: 26793 - RNA, 20 nt, Artificial Sequence
  HTT spacer sequence GTCN PAM
augccguuagccucccucca

SEQ ID NO: 26794 - RNA, 20 nt, Artificial Sequence
  HTT spacer sequence GTCN PAM
gcaccuccacugcucauacc

SEQ ID NO: 26795 - RNA, 20 nt, Artificial Sequence
  HTT spacer sequence GTCN PAM
cuaaccaugagguaugagca

SEQ ID NO: 26796 - RNA, 20 nt, Artificial Sequence
  HTT spacer sequence GTCN PAM
aggaaaguagaguaccaagg

SEQ ID NO: 26797 - RNA, 20 nt, Artificial Sequence
  HTT spacer sequence GTCN PAM
ugccuucuuaggcucuauuc

SEQ ID NO: 26798 - RNA, 20 nt, Artificial Sequence
  HTT spacer sequence GTCN PAM
gcuuuacucaucucucccca

SEQ ID NO: 26799 - RNA, 20 nt, Artificial Sequence
  HTT spacer sequence GTCN PAM
aaaggggaaaaccuguggug

SEQ ID NO: 26800 - RNA, 20 nt, Artificial Sequence
  HTT spacer sequence GTCN PAM
ccuugaacgccgcccaucau

SEQ ID NO: 26801 - RNA, 20 nt, Artificial Sequence
  HTT spacer sequence GTCN PAM
ugggaagaaaaaaauggaua

SEQ ID NO: 26802 - RNA, 20 nt, Artificial Sequence
  HTT spacer sequence GTCN PAM
aaucccaguguuggaccagg

SEQ ID NO: 26803 - RNA, 20 nt, Artificial Sequence
  HTT spacer sequence GTCN PAM
aacacugggauuugacaaga

SEQ ID NO: 26804 - RNA, 20 nt, Artificial Sequence
  HTT spacer sequence GTCN PAM
gauucugcacugcuggaagg

SEQ ID NO: 26805 - RNA, 20 nt, Artificial Sequence
  HTT spacer sequence GTCN PAM
caagaaaagcugaggauucc

SEQ ID NO: 26806 - RNA, 20 nt, Artificial Sequence
  HTT spacer sequence GTCN PAM
caucaucaugugacccacuu

SEQ ID NO: 26807 - RNA, 20 nt, Artificial Sequence
  HTT spacer sequence GTCN PAM
caugaugaugagacaaaucc

SEQ ID NO: 26808 - RNA, 20 nt, Artificial Sequence
  HTT spacer sequence GTCN PAM
acaagugggucacaugauga

SEQ ID NO: 26809 - RNA, 20 nt, Artificial Sequence
  HTT spacer sequence GTCN PAM
ccaacauguguugucaacaa

SEQ ID NO: 26810 - RNA, 20 nt, Artificial Sequence
  HTT spacer sequence GTCN PAM
gggcagggacgggaugucgg

SEQ ID NO: 26811 - RNA, 20 nt, Artificial Sequence
  HTT spacer sequence GTCN PAM
cugcccagacuggagucccc

SEQ ID NO: 26812 - RNA, 20 nt, Artificial Sequence
  HTT spacer sequence GTCN PAM
gagagacuccacucugaaug

SEQ ID NO: 26813 - RNA, 20 nt, Artificial Sequence
  HTT spacer sequence GTCN PAM
cuccgacaucccgucccugc

SEQ ID NO: 26814 - RNA, 20 nt, Artificial Sequence
  HTT spacer sequence GTCN PAM
uccccacuucccggccccau

SEQ ID NO: 26815 - RNA, 20 nt, Artificial Sequence
  HTT spacer sequence GTCN PAM
ggacauggggguuaugcuga

SEQ ID NO: 26816 - RNA, 20 nt, Artificial Sequence
  HTT spacer sequence GTCN PAM
cgaccccaucugaaauggag

SEQ ID NO: 26817 - RNA, 20 nt, Artificial Sequence
  HTT spacer sequence GTCN PAM
cgaucagcauaacccccaug

SEQ ID NO: 26818 - RNA, 20 nt, Artificial Sequence
  HTT spacer sequence GTCN PAM
uggccauggagcuuagauga

SEQ ID NO: 26819 - RNA, 20 nt, Artificial Sequence
  HTT spacer sequence GTCN PAM
agguugcguauuugccguag

SEQ ID NO: 26820 - RNA, 20 nt, Artificial Sequence
  HTT spacer sequence GTCN PAM
acggcaaauacgcaaccuug

SEQ ID NO: 26821 - RNA, 20 nt, Artificial Sequence
  HTT spacer sequence GTCN PAM
uaaugcgugacgucaauaac

SEQ ID NO: 26822 - RNA, 20 nt, Artificial Sequence
  HTT spacer sequence GTCN PAM
cgcauuacgacacuguguug

SEQ ID NO: 26823 - RNA, 20 nt, Artificial Sequence
  HTT spacer sequence GTCN PAM
auaacuuguuucuagugucu

SEQ ID NO: 26824 - RNA, 20 nt, Artificial Sequence
  HTT spacer sequence GTCN PAM
uggaaguugaucuuuagucg

SEQ ID NO: 26825 - RNA, 20 nt, Artificial Sequence
  HTT spacer sequence GTCN PAM
uaaaagagacccuuggaugc

SEQ ID NO: 26826 - RNA, 20 nt, Artificial Sequence
  HTT spacer sequence GTCN PAM
cuuuuacgacuaaagaucaa

SEQ ID NO: 26827 - RNA, 20 nt, Artificial Sequence
  HTT spacer sequence GTCN PAM
gagggcacccugcgcagagc

SEQ ID NO: 26828 - RNA, 20 nt, Artificial Sequence
  HTT spacer sequence GTCN PAM
cugucccucacccgugggca

SEQ ID NO: 26829 - RNA, 20 nt, Artificial Sequence
  HTT spacer sequence GTCN PAM
cucacccgugggcagguccu

SEQ ID NO: 26830 - RNA, 20 nt, Artificial Sequence
  HTT spacer sequence GTCN PAM
ugugagcagugggggggcca

SEQ ID NO: 26831 - RNA, 20 nt, Artificial Sequence
  HTT spacer sequence GTCN PAM
gagaagaagcccugcuuggg

SEQ ID NO: 26832 - RNA, 20 nt, Artificial Sequence
  HTT spacer sequence GTCN PAM
uaguaggucugagaagaagc

SEQ ID NO: 26833 - RNA, 20 nt, Artificial Sequence
  HTT spacer sequence GTCN PAM
ucccaggugcccacuucccu

SEQ ID NO: 26834 - RNA, 20 nt, Artificial Sequence
  HTT spacer sequence GTCN PAM
cucccggccucuacaggcau

SEQ ID NO: 26835 - RNA, 20 nt, Artificial Sequence
  HTT spacer sequence GTCN PAM
cuuuucaugaacaccugccg

SEQ ID NO: 26836 - RNA, 20 nt, Artificial Sequence
  HTT spacer sequence GTCN PAM
caaaaaaaaaaaaaaagaua

SEQ ID NO: 26837 - RNA, 20 nt, Artificial Sequence
  HTT spacer sequence GTCN PAM
cgcuguugucccccaggcug

SEQ ID NO: 26838 - RNA, 20 nt, Artificial Sequence
  HTT spacer sequence GTCN PAM
cccaggcuggagugcaaugg

SEQ ID NO: 26839 - RNA, 20 nt, Artificial Sequence
  HTT spacer sequence GTCN PAM
cuacuaaaaauacaaaaauu

SEQ ID NO: 26840 - RNA, 20 nt, Artificial Sequence
  HTT spacer sequence GTCN PAM
caaacuccugaccucaggug

SEQ ID NO: 26841 - RNA, 20 nt, Artificial Sequence
  HTT spacer sequence GTCN PAM
ggaguuugagaccagccugg

SEQ ID NO: 26842 - RNA, 20 nt, Artificial Sequence
  HTT spacer sequence GTCN PAM
gaacuuuuacagcuguucaa

SEQ ID NO: 26843 - RNA, 20 nt, Artificial Sequence
  HTT spacer sequence GTCN PAM
auuuggauuauguuuuagca

SEQ ID NO: 26844 - RNA, 20 nt, Artificial Sequence
  HTT spacer sequence GTCN PAM
uggaugacacuuuagcuuug

SEQ ID NO: 26845 - RNA, 20 nt, Artificial Sequence
  HTT spacer sequence GTCN PAM
uccaagaccucagugauaca

SEQ ID NO: 26846 - RNA, 20 nt, Artificial Sequence
  HTT spacer sequence GTCN PAM
uaccaaaauuuuuauuucaa

SEQ ID NO: 26847 - RNA, 20 nt, Artificial Sequence
  HTT spacer sequence GTCN PAM
ccucacgggcugcuucaaaa

SEQ ID NO: 26848 - RNA, 20 nt, Artificial Sequence
  HTT spacer sequence GTCN PAM
aucaugucuuccagcccgag

SEQ ID NO: 26849 - RNA, 20 nt, Artificial Sequence
  HTT spacer sequence GTCN PAM
uccagcccgagcugccugca

SEQ ID NO: 26850 - RNA, 20 nt, Artificial Sequence
  HTT spacer sequence GTCN PAM
ucggcucagaauuucuuccu

SEQ ID NO: 26851 - RNA, 20 nt, Artificial Sequence
  HTT spacer sequence GTCN PAM
augaauggcaaaguggcaaa

SEQ ID NO: 26852 - RNA, 20 nt, Artificial Sequence
  HTT spacer sequence GTCN PAM
uggacauagggcucuaagcc

SEQ ID NO: 26853 - RNA, 20 nt, Artificial Sequence
  HTT spacer sequence GTCN PAM
augaccaugucaaugaaugg

SEQ ID NO: 26854 - RNA, 20 nt, Artificial Sequence
  HTT spacer sequence GTCN PAM
ggcccagccuuccucaaggg

SEQ ID NO: 26855 - RNA, 20 nt, Artificial Sequence
  HTT spacer sequence GTCN PAM
uguggacggauguguagaug

SEQ ID NO: 26856 - RNA, 20 nt, Artificial Sequence
  HTT spacer sequence GTCN PAM
acaggacugcacgugguuug

SEQ ID NO: 26857 - RNA, 20 nt, Artificial Sequence
  HTT spacer sequence GTCN PAM
ugagcuuucaucagauucuc

SEQ ID NO: 26858 - RNA, 20 nt, Artificial Sequence
  HTT spacer sequence GTCN PAM
agcaauucucugagaaucug

SEQ ID NO: 26859 - RNA, 20 nt, Artificial Sequence
  HTT spacer sequence GTCN PAM
uucuguuucaggggaugcug

SEQ ID NO: 26860 - RNA, 20 nt, Artificial Sequence
  HTT spacer sequence GTCN PAM
cugcccacucuggcccgggc

SEQ ID NO: 26861 - RNA, 20 nt, Artificial Sequence
  HTT spacer sequence GTCN PAM
ccaaacugcccagucauuug

SEQ ID NO: 26862 - RNA, 20 nt, Artificial Sequence
  HTT spacer sequence GTCN PAM
uuugcaccuuccuccugaga

SEQ ID NO: 26863 - RNA, 20 nt, Artificial Sequence
  HTT spacer sequence GTCN PAM
uucucuuucucaggaggaag

SEQ ID NO: 26864 - RNA, 20 nt, Artificial Sequence
  HTT spacer sequence GTCN PAM
gccccaugcccccuccccac

SEQ ID NO: 26865 - RNA, 20 nt, Artificial Sequence
  HTT spacer sequence GTCN PAM
gagaucuugcuuuucaaaua

SEQ ID NO: 26866 - RNA, 20 nt, Artificial Sequence
  HTT spacer sequence GTCN PAM
agucacuuuuccaucucagc

SEQ ID NO: 26867 - RNA, 20 nt, Artificial Sequence
  HTT spacer sequence GTCN PAM
cuuuuccaucucagccuggc

SEQ ID NO: 26868 - RNA, 20 nt, Artificial Sequence
  HTT spacer sequence GTCN PAM
ugucaccgucaaguuauugu

SEQ ID NO: 26869 - RNA, 20 nt, Artificial Sequence
  HTT spacer sequence GTCN PAM
ccgucaaguuauuguagcca

SEQ ID NO: 26870 - RNA, 20 nt, Artificial Sequence
  HTT spacer sequence GTCN PAM
aguuauuguagccauccuuc

SEQ ID NO: 26871 - RNA, 20 nt, Artificial Sequence
  HTT spacer sequence GTCN PAM
gccagguccccuucucaucu

SEQ ID NO: 26872 - RNA, 20 nt, Artificial Sequence
  HTT spacer sequence GTCN PAM
ccuucucaucugcaccuacc

SEQ ID NO: 26873 - RNA, 20 nt, Artificial Sequence
  HTT spacer sequence GTCN PAM
cuaaaauuaggauccaccua

SEQ ID NO: 26874 - RNA, 20 nt, Artificial Sequence
  HTT spacer sequence GTCN PAM
uaaguuggccuggacauguc

SEQ ID NO: 26875 - RNA, 20 nt, Artificial Sequence
  HTT spacer sequence GTCN PAM
aggccaacuuaagacauaaa

SEQ ID NO: 26876 - RNA, 20 nt, Artificial Sequence
  HTT spacer sequence GTCN PAM
gccaaggaauacuuacuugg

SEQ ID NO: 26877 - RNA, 20 nt, Artificial Sequence
  HTT spacer sequence GTCN PAM
ggccuguauccuuaaagggc

SEQ ID NO: 26878 - RNA, 20 nt, Artificial Sequence
  HTT spacer sequence GTCN PAM
uugcugagggcaggcagcac

SEQ ID NO: 26879 - RNA, 20 nt, Artificial Sequence
  HTT spacer sequence GTCN PAM
gcaaaguguguccuugcuga

SEQ ID NO: 26880 - RNA, 20 nt, Artificial Sequence
  HTT spacer sequence GTCN PAM
aaagggcaucagugccauua

SEQ ID NO: 26881 - RNA, 20 nt, Artificial Sequence
  HTT spacer sequence GTCN PAM
uaugguuugugaucccuguc

SEQ ID NO: 26882 - RNA, 20 nt, Artificial Sequence
  HTT spacer sequence GTCN PAM
uucagguuucagcuuagugg

SEQ ID NO: 26883 - RNA, 20 nt, Artificial Sequence
  HTT spacer sequence GTCN PAM
gcgugugaucacagcacagg

SEQ ID NO: 26884 - RNA, 20 nt, Artificial Sequence
  HTT spacer sequence GTCN PAM
ucuuauuugacucucacaac

SEQ ID NO: 26885 - RNA, 20 nt, Artificial Sequence
  HTT spacer sequence GTCN PAM
aauaagaugacgcauauaaa

SEQ ID NO: 26886 - RNA, 20 nt, Artificial Sequence
  HTT spacer sequence GTCN PAM
aaugggaguaacagagccua

SEQ ID NO: 26887 - RNA, 20 nt, Artificial Sequence
  HTT spacer sequence GTCN PAM
cugaaauucucuaagccuug

SEQ ID NO: 26888 - RNA, 20 nt, Artificial Sequence
  HTT spacer sequence GTCN PAM
ucugagcuaggaaguagcca

SEQ ID NO: 26889 - RNA, 20 nt, Artificial Sequence
  HTT spacer sequence GTCN PAM
uagguugaauuugagagcgu

SEQ ID NO: 26890 - RNA, 20 nt, Artificial Sequence
  HTT spacer sequence GTCN PAM
ccucucugccacaaagcccc

SEQ ID NO: 26891 - RNA, 20 nt, Artificial Sequence
  HTT spacer sequence GTCN PAM
ggacugaauguaauggagcc

SEQ ID NO: 26892 - RNA, 20 nt, Artificial Sequence
  HTT spacer sequence GTCN PAM
ugacccaccuauuccccaaa

SEQ ID NO: 26893 - RNA, 20 nt, Artificial Sequence
  HTT spacer sequence GTCN PAM
gagcuguccuucuggaaggg

SEQ ID NO: 26894 - RNA, 20 nt, Artificial Sequence
  HTT spacer sequence GTCN PAM
uucuggaagggcaagggcac

SEQ ID NO: 26895 - RNA, 20 nt, Artificial Sequence
  HTT spacer sequence GTCN PAM
aggugcccuugcccuuccag

SEQ ID NO: 26896 - RNA, 20 nt, Artificial Sequence
  HTT spacer sequence GTCN PAM
aaagcacugaggggcagcgc

SEQ ID NO: 26897 - RNA, 20 nt, Artificial Sequence
  HTT spacer sequence GTCN PAM
cagaaugcccacucguguac

SEQ ID NO: 26898 - RNA, 20 nt, Artificial Sequence
  HTT spacer sequence GTCN PAM
uggcauuugauccaugagca

SEQ ID NO: 26899 - RNA, 20 nt, Artificial Sequence
  HTT spacer sequence GTCN PAM
ggaucuccaggcagggcugg

SEQ ID NO: 26900 - RNA, 20 nt, Artificial Sequence
  HTT spacer sequence GTCN PAM
agcccugccuggagauccag

SEQ ID NO: 26901 - RNA, 20 nt, Artificial Sequence
  HTT spacer sequence GTCN PAM
ccuccacagaguuugugacc

SEQ ID NO: 26902 - RNA, 20 nt, Artificial Sequence
  HTT spacer sequence GTCN PAM
caaacucuguggaggagacc

SEQ ID NO: 26903 - RNA, 20 nt, Artificial Sequence
  HTT spacer sequence GTCN PAM
ccguccaugaacgguggguu

SEQ ID NO: 26904 - RNA, 20 nt, Artificial Sequence
  HTT spacer sequence GTCN PAM
augaacgguggguuccuauc

SEQ ID NO: 26905 - RNA, 20 nt, Artificial Sequence
  HTT spacer sequence GTCN PAM
gcuucaccauguuuuuauuu

SEQ ID NO: 26906 - RNA, 20 nt, Artificial Sequence
  HTT spacer sequence GTCN PAM
acacuggaauuuaacuggaa

SEQ ID NO: 26907 - RNA, 20 nt, Artificial Sequence
  HTT spacer sequence GTCN PAM
uuuuauuuagauuuugaagu

SEQ ID NO: 26908 - RNA, 20 nt, Artificial Sequence
  HTT spacer sequence GTCN PAM
cugugaucuuuggucuuagc

SEQ ID NO: 26909 - RNA, 20 nt, Artificial Sequence
  HTT spacer sequence GTCN PAM
uagcuguuuuauguauuuag

SEQ ID NO: 26910 - RNA, 20 nt, Artificial Sequence
  HTT spacer sequence GTCN PAM
uauaugaucauaagauuaau

SEQ ID NO: 26911 - RNA, 20 nt, Artificial Sequence
  HTT spacer sequence GTCN PAM
gaguuaaaauguuuguuuuu

SEQ ID NO: 26912 - RNA, 20 nt, Artificial Sequence
  HTT spacer sequence GTCN PAM
uuagccacaauuuuuaaaaa

SEQ ID NO: 26913 - RNA, 20 nt, Artificial Sequence
  HTT spacer sequence GTCN PAM
aauuuuuuaaaaauuguggc

SEQ ID NO: 26914 - RNA, 20 nt, Artificial Sequence
  HTT spacer sequence GTCN PAM
uaguuuacauguuagagggc

SEQ ID NO: 26915 - RNA, 20 nt, Artificial Sequence
  HTT spacer sequence GTCN PAM
ggcuuuuaaguaguaauccc

SEQ ID NO: 26916 - RNA, 20 nt, Artificial Sequence
  HTT spacer sequence GTCN PAM
cauaauaaccucagggugag

SEQ ID NO: 26917 - RNA, 20 nt, Artificial Sequence
  HTT spacer sequence GTCN PAM
ccuguuggccaucucucacc

SEQ ID NO: 26918 - RNA, 20 nt, Artificial Sequence
  HTT spacer sequence GTCN PAM
agggacuuagaaaucugaau

SEQ ID NO: 26919 - RNA, 20 nt, Artificial Sequence
  HTT spacer sequence GTCN PAM
cucgacugucuccuguuggc

SEQ ID NO: 26920 - RNA, 20 nt, Artificial Sequence
  HTT spacer sequence GTCN PAM
gaagauuugaacuucagauu

SEQ ID NO: 26921 - RNA, 20 nt, Artificial Sequence
  HTT spacer sequence GTCN PAM
aguauugucuguuugucuaa

SEQ ID NO: 26922 - RNA, 20 nt, Artificial Sequence
  HTT spacer sequence GTCN PAM
guuugucuaaaauugguucu

SEQ ID NO: 26923 - RNA, 20 nt, Artificial Sequence
  HTT spacer sequence GTCN PAM
aaaauugguucuaaggaauc

SEQ ID NO: 26924 - RNA, 20 nt, Artificial Sequence
  HTT spacer sequence GTCN PAM
gucuaucccuuucaacuuuu

SEQ ID NO: 26925 - RNA, 20 nt, Artificial Sequence
  HTT spacer sequence GTCN PAM
aucccuuucaacuuuuguga

SEQ ID NO: 26926 - RNA, 20 nt, Artificial Sequence
  HTT spacer sequence GTCN PAM
agaaagaaggacaaauaccc

SEQ ID NO: 26927 - RNA, 20 nt, Artificial Sequence
  HTT spacer sequence GTCN PAM
uucuuucuggacuaagaagc

SEQ ID NO: 26928 - RNA, 20 nt, Artificial Sequence
  HTT spacer sequence GTCN PAM
caggacccauuuuuuucuua

SEQ ID NO: 26929 - RNA, 20 nt, Artificial Sequence
  HTT spacer sequence GTCN PAM
ugagacuuacucuguguguu

SEQ ID NO: 26930 - RNA, 20 nt, Artificial Sequence
  HTT spacer sequence GTCN PAM
uggaggaacaacauguaaga

SEQ ID NO: 26931 - RNA, 20 nt, Artificial Sequence
  HTT spacer sequence GTCN PAM
cugugaaugauuuuuaaguc

SEQ ID NO: 26932 - RNA, 20 nt, Artificial Sequence
  HTT spacer sequence GTCN PAM
acacucaccgcggugcacgu

SEQ ID NO: 26933 - RNA, 20 nt, Artificial Sequence
  HTT spacer sequence GTCN PAM
ugcugcuccucccuagcugu

SEQ ID NO: 26934 - RNA, 20 nt, Artificial Sequence
  HTT spacer sequence GTCN PAM
gggaggcuguaguccauugc

SEQ ID NO: 26935 - RNA, 20 nt, Artificial Sequence
  HTT spacer sequence GTCN PAM
auugcuuugccagcucuuuu

SEQ ID NO: 26936 - RNA, 20 nt, Artificial Sequence
  HTT spacer sequence GTCN PAM
cugacccuacagaccagcug

SEQ ID NO: 26937 - RNA, 20 nt, Artificial Sequence
  HTT spacer sequence GTCN PAM
gagacagccgcauguguacg

SEQ ID NO: 26938 - RNA, 20 nt, Artificial Sequence
  HTT spacer sequence GTCN PAM
guagggucagagacagccgc

SEQ ID NO: 26939 - RNA, 20 nt, Artificial Sequence
  HTT spacer sequence GTCN PAM
ucuuuguguucucagaaauu

SEQ ID NO: 26940 - RNA, 20 nt, Artificial Sequence
  HTT spacer sequence GTCN PAM
gcaagcaacaaccuuuuguu

SEQ ID NO: 26941 - RNA, 20 nt, Artificial Sequence
  HTT spacer sequence GTCN PAM
gguucagccaucuguuuugg

SEQ ID NO: 26942 - RNA, 20 nt, Artificial Sequence
  HTT spacer sequence GTCN PAM
auaacuggcuuaaaucacug

SEQ ID NO: 26943 - RNA, 20 nt, Artificial Sequence
  HTT spacer sequence GTCN PAM
aagucuauaacuggcuuaaa

SEQ ID NO: 26944 - RNA, 20 nt, Artificial Sequence
  HTT spacer sequence GTCN PAM
uuuguucuugccagggcccc

SEQ ID NO: 26945 - RNA, 20 nt, Artificial Sequence
  HTT spacer sequence GTCN PAM
gguggggaauggccccuguu

SEQ ID NO: 26946 - RNA, 20 nt, Artificial Sequence
  HTT spacer sequence GTCN PAM
cacagaggugggggugccuc

SEQ ID NO: 26947 - RNA, 20 nt, Artificial Sequence
  HTT spacer sequence GTCN PAM
acacauuuuacacagcacgc

SEQ ID NO: 26948 - RNA, 20 nt, Artificial Sequence
  HTT spacer sequence GTCN PAM
uuagucuucugcauaguacu

SEQ ID NO: 26949 - RNA, 20 nt, Artificial Sequence
  HTT spacer sequence GTCN PAM
ucugcauaguacuuuucucu

SEQ ID NO: 26950 - RNA, 20 nt, Artificial Sequence
  HTT spacer sequence GTCN PAM
uucucuaauuacaaaaccuu

SEQ ID NO: 26951 - RNA, 20 nt, Artificial Sequence
  HTT spacer sequence GTCN PAM
uuggcugugcauuaaaaugc

SEQ ID NO: 26952 - RNA, 20 nt, Artificial Sequence
  HTT spacer sequence GTCN PAM
uucaggcuucaguuugugau

SEQ ID NO: 26953 - RNA, 20 nt, Artificial Sequence
  HTT spacer sequence GTCN PAM
uccguuccaggugcuuuaca

SEQ ID NO: 26954 - RNA, 20 nt, Artificial Sequence
  HTT spacer sequence GTCN PAM
uguuaugaauacucaacaaa

SEQ ID NO: 26955 - RNA, 20 nt, Artificial Sequence
  HTT spacer sequence GTCN PAM
caacuguuuuaaagcaaugg

SEQ ID NO: 26956 - RNA, 20 nt, Artificial Sequence
  HTT spacer sequence GTCN PAM
uaucgaggugauuaaaaaaa

SEQ ID NO: 26957 - RNA, 20 nt, Artificial Sequence
  HTT spacer sequence GTCN PAM
uccaauaaauauuaauaggc

SEQ ID NO: 26958 - RNA, 20 nt, Artificial Sequence
  HTT spacer sequence GTCN PAM
ggagaucgagaccaucccag

SEQ ID NO: 26959 - RNA, 20 nt, Artificial Sequence
  HTT spacer sequence GTCN PAM
cgaucuccugaccucgugau

SEQ ID NO: 26960 - RNA, 20 nt, Artificial Sequence
  HTT spacer sequence GTCN PAM
cuacuaaaaauacaaaaaau

SEQ ID NO: 26961 - RNA, 20 nt, Artificial Sequence
  HTT spacer sequence GTCN PAM
cagcuacuugggaggcugag

SEQ ID NO: 26962 - RNA, 20 nt, Artificial Sequence
  HTT spacer sequence GTCN PAM
cccaggcuggagugcagugg

SEQ ID NO: 26963 - RNA, 20 nt, Artificial Sequence
  HTT spacer sequence GTCN PAM
ugcucugucgcccaggcugg

SEQ ID NO: 26964 - RNA, 20 nt, Artificial Sequence
  HTT spacer sequence GTCN PAM
caaaaaaaaaaaaaaauauu

SEQ ID NO: 26965 - RNA, 20 nt, Artificial Sequence
  HTT spacer sequence GTCN PAM
aaugagaaguccuucucuau

SEQ ID NO: 26966 - RNA, 20 nt, Artificial Sequence
  HTT spacer sequence GTCN PAM
uucucuauccuaggaaguug

SEQ ID NO: 26967 - RNA, 20 nt, Artificial Sequence
  HTT spacer sequence GTCN PAM
agaauaucauaccuacuaaa

SEQ ID NO: 26968 - RNA, 20 nt, Artificial Sequence
  HTT spacer sequence GTCN PAM
ugagucuagaauaucauacc

SEQ ID NO: 26969 - RNA, 20 nt, Artificial Sequence
  HTT spacer sequence GTCN PAM
acagcgucugccuugggagu

SEQ ID NO: 26970 - RNA, 20 nt, Artificial Sequence
  HTT spacer sequence GTCN PAM
gccuugggaguuuccaugcc

SEQ ID NO: 26971 - RNA, 20 nt, Artificial Sequence
  HTT spacer sequence GTCN PAM
gagugcuugaggggcuuggg

SEQ ID NO: 26972 - RNA, 20 nt, Artificial Sequence
  HTT spacer sequence GTCN PAM
uccuugcuucacuggcuuuc

SEQ ID NO: 26973 - RNA, 20 nt, Artificial Sequence
  HTT spacer sequence GTCN PAM
cucagcuaguaucaaagggc

SEQ ID NO: 26974 - RNA, 20 nt, Artificial Sequence
  HTT spacer sequence GTCN PAM
gucccucagcuaguaucaaa

SEQ ID NO: 26975 - RNA, 20 nt, Artificial Sequence
  HTT spacer sequence GTCN PAM
ugggagaccagagaaagacg

SEQ ID NO: 26976 - RNA, 20 nt, Artificial Sequence
  HTT spacer sequence GTCN PAM
cccaggaccugugucugucc

SEQ ID NO: 26977 - RNA, 20 nt, Artificial Sequence
  HTT spacer sequence GTCN PAM
uucucuggucucccaggacc

SEQ ID NO: 26978 - RNA, 20 nt, Artificial Sequence
  HTT spacer sequence GTCN PAM
uaaaggaagucugaggcuga

SEQ ID NO: 26979 - RNA, 20 nt, Artificial Sequence
  HTT spacer sequence GTCN PAM
gaggcugaggagccacagga

SEQ ID NO: 26980 - RNA, 20 nt, Artificial Sequence
  HTT spacer sequence GTCN PAM
caggcugcugcuggccuuau

SEQ ID NO: 26981 - RNA, 20 nt, Artificial Sequence
  HTT spacer sequence GTCN PAM
ugaaccugagcucuggccuu

SEQ ID NO: 26982 - RNA, 20 nt, Artificial Sequence
  HTT spacer sequence GTCN PAM
aaguggauuccacaguuaca

SEQ ID NO: 26983 - RNA, 20 nt, Artificial Sequence
  HTT spacer sequence GTCN PAM
ugcuuucuacacugggcaua

SEQ ID NO: 26984 - RNA, 20 nt, Artificial Sequence
  HTT spacer sequence GTCN PAM
ucucuuaaccguugcuuguu

SEQ ID NO: 26985 - RNA, 20 nt, Artificial Sequence
  HTT spacer sequence GTCN PAM
cugcagucgguguuggccuu

SEQ ID NO: 26986 - RNA, 20 nt, Artificial Sequence
  HTT spacer sequence GTCN PAM
guguuggccuugggucauaa

SEQ ID NO: 26987 - RNA, 20 nt, Artificial Sequence
  HTT spacer sequence GTCN PAM
uaaaaggaauagcggcgugc

SEQ ID NO: 26988 - RNA, 20 nt, Artificial Sequence
  HTT spacer sequence GTCN PAM
acagcuacacacgugugccc

SEQ ID NO: 26989 - RNA, 20 nt, Artificial Sequence
  HTT spacer sequence GTCN PAM
gcucguuccuugcagaagac

SEQ ID NO: 26990 - RNA, 20 nt, Artificial Sequence
  HTT spacer sequence GTCN PAM
ucugcaaggaacgagcagac

SEQ ID NO: 26991 - RNA, 20 nt, Artificial Sequence
  HTT spacer sequence GTCN PAM
cgcccucucacgugugccca

SEQ ID NO: 26992 - RNA, 20 nt, Artificial Sequence
  HTT spacer sequence GTCN PAM
cuaguagaaauacuggguuu

SEQ ID NO: 26993 - RNA, 20 nt, Artificial Sequence
  HTT spacer sequence GTCN PAM
aacacuaaucucuuagggau

SEQ ID NO: 26994 - RNA, 20 nt, Artificial Sequence
  HTT spacer sequence GTCN PAM
aguugcucuagaaucagguc

SEQ ID NO: 26995 - RNA, 20 nt, Artificial Sequence
  HTT spacer sequence GTCN PAM
gcuauuaagcaaaguggucu

SEQ ID NO: 26996 - RNA, 20 nt, Artificial Sequence
  HTT spacer sequence GTCN PAM
ucagaauugguuuaaaguag

SEQ ID NO: 26997 - RNA, 20 nt, Artificial Sequence
  HTT spacer sequence GTCN PAM
ggauuucgagaccagccugg

SEQ ID NO: 26998 - RNA, 20 nt, Artificial Sequence
  HTT spacer sequence GTCN PAM
cgaaauccugaccucaagug

SEQ ID NO: 26999 - RNA, 20 nt, Artificial Sequence
  HTT spacer sequence GTCN PAM
ccugaguagcugggauuaca

SEQ ID NO: 27000 - RNA, 20 nt, Artificial Sequence
  HTT spacer sequence GTCN PAM
cagucuccugaguagcuggg

SEQ ID NO: 27001 - RNA, 20 nt, Artificial Sequence
  HTT spacer sequence GTCN PAM
ugcucuguugcccaggcuag

SEQ ID NO: 27002 - RNA, 20 nt, Artificial Sequence
  HTT spacer sequence GTCN PAM
caaaaaaaaaaaagguaggu

SEQ ID NO: 27003 - RNA, 20 nt, Artificial Sequence
  HTT spacer sequence GTCN PAM
cccuccaucaacccucacuc

SEQ ID NO: 27004 - RNA, 20 nt, Artificial Sequence
  HTT spacer sequence GTCN PAM
gucccccuccaucaacccuc

SEQ ID NO: 27005 - RNA, 20 nt, Artificial Sequence
  HTT spacer sequence GTCN PAM
gccuuucuuuccugccugag

SEQ ID NO: 27006 - RNA, 20 nt, Artificial Sequence
  HTT spacer sequence GTCN PAM
gggagaauggagccaggucc

SEQ ID NO: 27007 - RNA, 20 nt, Artificial Sequence
  HTT spacer sequence GTCN PAM
cagggaagaggcuuguggcu

SEQ ID NO: 27008 - RNA, 20 nt, Artificial Sequence
  HTT spacer sequence GTCN PAM
agggaggcuugcuccaagga

SEQ ID NO: 27009 - RNA, 20 nt, Artificial Sequence
  HTT spacer sequence GTCN PAM
uuggagcaagccucccuaga

SEQ ID NO: 27010 - RNA, 20 nt, Artificial Sequence
  HTT spacer sequence GTCN PAM
cuguggguucauuagcaucu

SEQ ID NO: 27011 - RNA, 20 nt, Artificial Sequence
  HTT spacer sequence GTCN PAM
cauaaccagaugcuaaugaa

SEQ ID NO: 27012 - RNA, 20 nt, Artificial Sequence
  HTT spacer sequence GTCN PAM
ccacgagccccuccaaagga

SEQ ID NO: 27013 - RNA, 20 nt, Artificial Sequence
  HTT spacer sequence GTCN PAM
ugaggucaugccguccagag

SEQ ID NO: 27014 - RNA, 20 nt, Artificial Sequence
  HTT spacer sequence GTCN PAM
ugccguccagagcacaccug

SEQ ID NO: 27015 - RNA, 20 nt, Artificial Sequence
  HTT spacer sequence GTCN PAM
agagcacaccugaggauagg

SEQ ID NO: 27016 - RNA, 20 nt, Artificial Sequence
  HTT spacer sequence GTCN PAM
uggccuauccucaggugugc

SEQ ID NO: 27017 - RNA, 20 nt, Artificial Sequence
  HTT spacer sequence GTCN PAM
ucuggaaggcagcuguaaca

SEQ ID NO: 27018 - RNA, 20 nt, Artificial Sequence
  HTT spacer sequence GTCN PAM
cucccuggguggguaccaga

SEQ ID NO: 27019 - RNA, 20 nt, Artificial Sequence
  HTT spacer sequence GTCN PAM
uuaucauagagcccccucug

SEQ ID NO: 27020 - RNA, 20 nt, Artificial Sequence
  HTT spacer sequence GTCN PAM
uuugucaccucacugaaggc

SEQ ID NO: 27021 - RNA, 20 nt, Artificial Sequence
  HTT spacer sequence GTCN PAM
ccucacugaaggcauguaag

SEQ ID NO: 27022 - RNA, 20 nt, Artificial Sequence
  HTT spacer sequence GTCN PAM
ggccagcucagcuuacaugc

SEQ ID NO: 27023 - RNA, 20 nt, Artificial Sequence
  HTT spacer sequence GTCN PAM
gagcaccucacgcacagaga

SEQ ID NO: 27024 - RNA, 20 nt, Artificial Sequence
  HTT spacer sequence GTCN PAM
aguucucugugcgugaggug

SEQ ID NO: 27025 - RNA, 20 nt, Artificial Sequence
  HTT spacer sequence GTCN PAM
cuaacuccugccugcuucuc

SEQ ID NO: 27026 - RNA, 20 nt, Artificial Sequence
  HTT spacer sequence GTCN PAM
ucauccugaggcugcuggca

SEQ ID NO: 27027 - RNA, 20 nt, Artificial Sequence
  HTT spacer sequence GTCN PAM
caggaagcaguuggagcugu

SEQ ID NO: 27028 - RNA, 20 nt, Artificial Sequence
  HTT spacer sequence GTCN PAM
cagagcuggcaccuucuccc

SEQ ID NO: 27029 - RNA, 20 nt, Artificial Sequence
  HTT spacer sequence GTCN PAM
ggcuuccugcuuccucacag

SEQ ID NO: 27030 - RNA, 20 nt, Artificial Sequence
  HTT spacer sequence GTCN PAM
guccugacucaacucggaug

SEQ ID NO: 27031 - RNA, 20 nt, Artificial Sequence
  HTT spacer sequence GTCN PAM
ugacucaacucggaugaugu

SEQ ID NO: 27032 - RNA, 20 nt, Artificial Sequence
  HTT spacer sequence GTCN PAM
ggacagacauacugugagga

SEQ ID NO: 27033 - RNA, 20 nt, Artificial Sequence
  HTT spacer sequence GTCN PAM
cuuccuuuucaucuucucag

SEQ ID NO: 27034 - RNA, 20 nt, Artificial Sequence
  HTT spacer sequence GTCN PAM
cccaaaccgggaggggauuu

SEQ ID NO: 27035 - RNA, 20 nt, Artificial Sequence
  HTT spacer sequence GTCN PAM
uuaaggaguucaucuaccgc

SEQ ID NO: 27036 - RNA, 20 nt, Artificial Sequence
  HTT spacer sequence GTCN PAM
ccauugucggacaucuaccg

SEQ ID NO: 27037 - RNA, 20 nt, Artificial Sequence
  HTT spacer sequence GTCN PAM
gacaucuaccgggaggaaau

SEQ ID NO: 27038 - RNA, 20 nt, Artificial Sequence
  HTT spacer sequence GTCN PAM
gacaauggugaccugaagga

SEQ ID NO: 27039 - RNA, 20 nt, Artificial Sequence
  HTT spacer sequence GTCN PAM
aaugagaagaucccaguacu

SEQ ID NO: 27040 - RNA, 20 nt, Artificial Sequence
  HTT spacer sequence GTCN PAM
ggaaagguucauguguagug

SEQ ID NO: 27041 - RNA, 20 nt, Artificial Sequence
  HTT spacer sequence GTCN PAM
acuacacaugaaccuuuccu

SEQ ID NO: 27042 - RNA, 20 nt, Artificial Sequence
  HTT spacer sequence GTCN PAM
cacguuguccacuacacaug

SEQ ID NO: 27043 - RNA, 20 nt, Artificial Sequence
  HTT spacer sequence GTCN PAM
cagaauguuuucuuguguuc

SEQ ID NO: 27044 - RNA, 20 nt, Artificial Sequence
  HTT spacer sequence GTCN PAM
gauccuguugugucucagug

SEQ ID NO: 27045 - RNA, 20 nt, Artificial Sequence
  HTT spacer sequence GTCN PAM
cagugguccauuuucucaua

SEQ ID NO: 27046 - RNA, 20 nt, Artificial Sequence
  HTT spacer sequence GTCN PAM
auuuucucauaugggaacaa

SEQ ID NO: 27047 - RNA, 20 nt, Artificial Sequence
  HTT spacer sequence GTCN PAM
gcuuguucccauaugagaaa

SEQ ID NO: 27048 - RNA, 20 nt, Artificial Sequence
  HTT spacer sequence GTCN PAM
gguuucuuggcacucgccuu

SEQ ID NO: 27049 - RNA, 20 nt, Artificial Sequence
  HTT spacer sequence GTCN PAM
gagccccaagccugcuuucu

SEQ ID NO: 27050 - RNA, 20 nt, Artificial Sequence
  HTT spacer sequence GTCN PAM
uggucugcuuccagcccucc

SEQ ID NO: 27051 - RNA, 20 nt, Artificial Sequence
  HTT spacer sequence GTCN PAM
gcuuccagcccuccuaccug

SEQ ID NO: 27052 - RNA, 20 nt, Artificial Sequence
  HTT spacer sequence GTCN PAM
gucuaaccucuagagacccu

SEQ ID NO: 27053 - RNA, 20 nt, Artificial Sequence
  HTT spacer sequence GTCN PAM
aaccucuagagacccucagu

SEQ ID NO: 27054 - RNA, 20 nt, Artificial Sequence
  HTT spacer sequence GTCN PAM
cuagagguuagacggacuug

SEQ ID NO: 27055 - RNA, 20 nt, Artificial Sequence
  HTT spacer sequence GTCN PAM
uauguaaaaugggggucgug

SEQ ID NO: 27056 - RNA, 20 nt, Artificial Sequence
  HTT spacer sequence GTCN PAM
ugucuauuucauagaauugu

SEQ ID NO: 27057 - RNA, 20 nt, Artificial Sequence
  HTT spacer sequence GTCN PAM
auuucauagaauuguugcag

SEQ ID NO: 27058 - RNA, 20 nt, Artificial Sequence
  HTT spacer sequence GTCN PAM
aaaugaauaagucaccacuu

SEQ ID NO: 27059 - RNA, 20 nt, Artificial Sequence
  HTT spacer sequence GTCN PAM
ccacuuuugccccuauuuga

SEQ ID NO: 27060 - RNA, 20 nt, Artificial Sequence
  HTT spacer sequence GTCN PAM
caccacaagaucacaccucu

SEQ ID NO: 27061 - RNA, 20 nt, Artificial Sequence
  HTT spacer sequence GTCN PAM
guucucagugacugugcccu

SEQ ID NO: 27062 - RNA, 20 nt, Artificial Sequence
  HTT spacer sequence GTCN PAM
cugagaacugacugauuaca

SEQ ID NO: 27063 - RNA, 20 nt, Artificial Sequence
  HTT spacer sequence GTCN PAM
uguccuagaaagucuggcag

SEQ ID NO: 27064 - RNA, 20 nt, Artificial Sequence
  HTT spacer sequence GTCN PAM
uagaaagucuggcaggggca

SEQ ID NO: 27065 - RNA, 20 nt, Artificial Sequence
  HTT spacer sequence GTCN PAM
ggcaggggcacccugacucc

SEQ ID NO: 27066 - RNA, 20 nt, Artificial Sequence
  HTT spacer sequence GTCN PAM
gggugccccugccagacuuu

SEQ ID NO: 27067 - RNA, 20 nt, Artificial Sequence
  HTT spacer sequence GTCN PAM
aguccucuccccagucccuc

SEQ ID NO: 27068 - RNA, 20 nt, Artificial Sequence
  HTT spacer sequence GTCN PAM
ucuccccagucccucgggcu

SEQ ID NO: 27069 - RNA, 20 nt, Artificial Sequence
  HTT spacer sequence GTCN PAM
cucgggcuucugcagauuug

SEQ ID NO: 27070 - RNA, 20 nt, Artificial Sequence
  HTT spacer sequence GTCN PAM
ccugccacaaccuucuggga

SEQ ID NO: 27071 - RNA, 20 nt, Artificial Sequence
  HTT spacer sequence GTCN PAM
aaagagagcccugagcaggu

SEQ ID NO: 27072 - RNA, 20 nt, Artificial Sequence
  HTT spacer sequence GTCN PAM
gaugggcaguucaagagcaa

SEQ ID NO: 27073 - RNA, 20 nt, Artificial Sequence
  HTT spacer sequence GTCN PAM
cgcacguccgaugggcaguu

SEQ ID NO: 27074 - RNA, 20 nt, Artificial Sequence
  HTT spacer sequence GTCN PAM
ugggucacgcacguccgaug

SEQ ID NO: 27075 - RNA, 20 nt, Artificial Sequence
  HTT spacer sequence GTCN PAM
uugccuugucugugcucauu

SEQ ID NO: 27076 - RNA, 20 nt, Artificial Sequence
  HTT spacer sequence GTCN PAM
gugcucauuuucuuuguuca

SEQ ID NO: 27077 - RNA, 20 nt, Artificial Sequence
  HTT spacer sequence GTCN PAM
guaucugugucugaaucagu

SEQ ID NO: 27078 - RNA, 20 nt, Artificial Sequence
  HTT spacer sequence GTCN PAM
gaaucaguccugcacgcucu

SEQ ID NO: 27079 - RNA, 20 nt, Artificial Sequence
  HTT spacer sequence GTCN PAM
ugcacgcucuccuucucucu

SEQ ID NO: 27080 - RNA, 20 nt, Artificial Sequence
  HTT spacer sequence GTCN PAM
cuuguucuuucuuuaccccg

SEQ ID NO: 27081 - RNA, 20 nt, Artificial Sequence
  HTT spacer sequence GTCN PAM
ccgugauaaacgggguaaag

SEQ ID NO: 27082 - RNA, 20 nt, Artificial Sequence
  HTT spacer sequence GTCN PAM
auugcucuaguucuccuguc

SEQ ID NO: 27083 - RNA, 20 nt, Artificial Sequence
  HTT spacer sequence GTCN PAM
uaagcaccccaucccgucuc

SEQ ID NO: 27084 - RNA, 20 nt, Artificial Sequence
  HTT spacer sequence GTCN PAM
cucuggccuuaccacaagug

SEQ ID NO: 27085 - RNA, 20 nt, Artificial Sequence
  HTT spacer sequence GTCN PAM
gaggcagccacgccacuugu

SEQ ID NO: 27086 - RNA, 20 nt, Artificial Sequence
  HTT spacer sequence GTCN PAM
ccaucaugaugucugaggca

SEQ ID NO: 27087 - RNA, 20 nt, Artificial Sequence
  HTT spacer sequence GTCN PAM
gaaacaacuguucguuagau

SEQ ID NO: 27088 - RNA, 20 nt, Artificial Sequence
  HTT spacer sequence GTCN PAM
gucggauguauuuucacuga

SEQ ID NO: 27089 - RNA, 20 nt, Artificial Sequence
  HTT spacer sequence GTCN PAM
gauguauuuucacugaaucc

SEQ ID NO: 27090 - RNA, 20 nt, Artificial Sequence
  HTT spacer sequence GTCN PAM
agaagaauagauuaaaaaga

SEQ ID NO: 27091 - RNA, 20 nt, Artificial Sequence
  HTT spacer sequence GTCN PAM
gaggaaccauuacuuugacu

SEQ ID NO: 27092 - RNA, 20 nt, Artificial Sequence
  HTT spacer sequence GTCN PAM
aaguaaugguuccucugacc

SEQ ID NO: 27093 - RNA, 20 nt, Artificial Sequence
  HTT spacer sequence GTCN PAM
gcuuagagugggugaaaucu

SEQ ID NO: 27094 - RNA, 20 nt, Artificial Sequence
  HTT spacer sequence GTCN PAM
cagggcuggacuccagggaa

SEQ ID NO: 27095 - RNA, 20 nt, Artificial Sequence
  HTT spacer sequence GTCN PAM
agcccugagacugugcagcu

SEQ ID NO: 27096 - RNA, 20 nt, Artificial Sequence
  HTT spacer sequence GTCN PAM
cugcccugucccugugucug

SEQ ID NO: 27097 - RNA, 20 nt, Artificial Sequence
  HTT spacer sequence GTCN PAM
cugugucugcuccacugggg

SEQ ID NO: 27098 - RNA, 20 nt, Artificial Sequence
  HTT spacer sequence GTCN PAM
gcuccacuggggguugacca

SEQ ID NO: 27099 - RNA, 20 nt, Artificial Sequence
  HTT spacer sequence GTCN PAM
acccccaguggagcagacac

SEQ ID NO: 27100 - RNA, 20 nt, Artificial Sequence
  HTT spacer sequence GTCN PAM
gcccuggcagccuggucaac

SEQ ID NO: 27101 - RNA, 20 nt, Artificial Sequence
  HTT spacer sequence GTCN PAM
cggacagugcagccgauguc

SEQ ID NO: 27102 - RNA, 20 nt, Artificial Sequence
  HTT spacer sequence GTCN PAM
gagacacaugagaggcaggu

SEQ ID NO: 27103 - RNA, 20 nt, Artificial Sequence
  HTT spacer sequence GTCN PAM
auacuucgguuuccucaaug

SEQ ID NO: 27104 - RNA, 20 nt, Artificial Sequence
  HTT spacer sequence GTCN PAM
cuuaaaccucacacaguucu

SEQ ID NO: 27105 - RNA, 20 nt, Artificial Sequence
  HTT spacer sequence GTCN PAM
gcguagcugucagcucuccg

SEQ ID NO: 27106 - RNA, 20 nt, Artificial Sequence
  HTT spacer sequence GTCN PAM
gcucuccguuacaggcuuga

SEQ ID NO: 27107 - RNA, 20 nt, Artificial Sequence
  HTT spacer sequence GTCN PAM
acccuucucaagccuguaac

SEQ ID NO: 27108 - RNA, 20 nt, Artificial Sequence
  HTT spacer sequence GTCN PAM
agccuagaaauauaaauguu

SEQ ID NO: 27109 - RNA, 20 nt, Artificial Sequence
  HTT spacer sequence GTCN PAM
uacucaguuugaagaaacuu

SEQ ID NO: 27110 - RNA, 20 nt, Artificial Sequence
  HTT spacer sequence GTCN PAM
uggugacgcagccccucgug

SEQ ID NO: 27111 - RNA, 20 nt, Artificial Sequence
  HTT spacer sequence GTCN PAM
ccaggacaccaaggagggug

SEQ ID NO: 27112 - RNA, 20 nt, Artificial Sequence
  HTT spacer sequence GTCN PAM
ugacugauauuccagagcag

SEQ ID NO: 27113 - RNA, 20 nt, Artificial Sequence
  HTT spacer sequence GTCN PAM
agacaccauucagcuacucu

SEQ ID NO: 27114 - RNA, 20 nt, Artificial Sequence
  HTT spacer sequence GTCN PAM
cugcucuggaauaucaguca

SEQ ID NO: 27115 - RNA, 20 nt, Artificial Sequence
  HTT spacer sequence GTCN PAM
gggggcugcgauuaccaaug

SEQ ID NO: 27116 - RNA, 20 nt, Artificial Sequence
  HTT spacer sequence GTCN PAM
ugcagagauuuuaucaggcu

SEQ ID NO: 27117 - RNA, 20 nt, Artificial Sequence
  HTT spacer sequence GTCN PAM
uuucugugaguucaaaccac

SEQ ID NO: 27118 - RNA, 20 nt, Artificial Sequence
  HTT spacer sequence GTCN PAM
acccuccaaacugucauuuc

SEQ ID NO: 27119 - RNA, 20 nt, Artificial Sequence
  HTT spacer sequence GTCN PAM
caagucaucaagauugucuu

SEQ ID NO: 27120 - RNA, 20 nt, Artificial Sequence
  HTT spacer sequence GTCN PAM
ucaagauugucuuuaaauuc

SEQ ID NO: 27121 - RNA, 20 nt, Artificial Sequence
  HTT spacer sequence GTCN PAM
uuaaauucaugcauagaagc

SEQ ID NO: 27122 - RNA, 20 nt, Artificial Sequence
  HTT spacer sequence GTCN PAM
uaagcaaggccuguaaaaug

SEQ ID NO: 27123 - RNA, 20 nt, Artificial Sequence
  HTT spacer sequence GTCN PAM
uugauuugaaaaaugggcuu

SEQ ID NO: 27124 - RNA, 20 nt, Artificial Sequence
  HTT spacer sequence GTCN PAM
ggcugagcucacggggcaca

SEQ ID NO: 27125 - RNA, 20 nt, Artificial Sequence
  HTT spacer sequence GTCN PAM
ucccugccucaaugggagga

SEQ ID NO: 27126 - RNA, 20 nt, Artificial Sequence
  HTT spacer sequence GTCN PAM
ugcugcucuuguugacaugu

SEQ ID NO: 27127 - RNA, 20 nt, Artificial Sequence
  HTT spacer sequence GTCN PAM
acaagagcagcaagacaccc

SEQ ID NO: 27128 - RNA, 20 nt, Artificial Sequence
  HTT spacer sequence GTCN PAM
uccuggaaggagagcccaca

SEQ ID NO: 27129 - RNA, 20 nt, Artificial Sequence
  HTT spacer sequence GTCN PAM
ucucugugucuuccuggaag

SEQ ID NO: 27130 - RNA, 20 nt, Artificial Sequence
  HTT spacer sequence GTCN PAM
uggccgugcaggccaucacc

SEQ ID NO: 27131 - RNA, 20 nt, Artificial Sequence
  HTT spacer sequence GTCN PAM
uugcacugagcaccagugag

SEQ ID NO: 27132 - RNA, 20 nt, Artificial Sequence
  HTT spacer sequence GTCN PAM
agagcuuucagaggcuuguu

SEQ ID NO: 27133 - RNA, 20 nt, Artificial Sequence
  HTT spacer sequence GTCN PAM
cugggacauagcaggugcug

SEQ ID NO: 27134 - RNA, 20 nt, Artificial Sequence
  HTT spacer sequence GTCN PAM
cagagacacgugggaacuca

SEQ ID NO: 27135 - RNA, 20 nt, Artificial Sequence
  HTT spacer sequence GTCN PAM
ccagcaccugcuauguccca

SEQ ID NO: 27136 - RNA, 20 nt, Artificial Sequence
  HTT spacer sequence GTCN PAM
agcagcuucaaccaggccgu

SEQ ID NO: 27137 - RNA, 20 nt, Artificial Sequence
  HTT spacer sequence GTCN PAM
guguggccugugcaggagau

SEQ ID NO: 27138 - RNA, 20 nt, Artificial Sequence
  HTT spacer sequence GTCN PAM
gcaucuccugcacaggccac

SEQ ID NO: 27139 - RNA, 20 nt, Artificial Sequence
  HTT spacer sequence GTCN PAM
gugagaagcuggaaacguga

SEQ ID NO: 27140 - RNA, 20 nt, Artificial Sequence
  HTT spacer sequence GTCN PAM
cguuuccagcuucucacuga

SEQ ID NO: 27141 - RNA, 20 nt, Artificial Sequence
  HTT spacer sequence GTCN PAM
guuccugucacguuuccagc

SEQ ID NO: 27142 - RNA, 20 nt, Artificial Sequence
  HTT spacer sequence GTCN PAM
uccccuaaaugcucaauaac

SEQ ID NO: 27143 - RNA, 20 nt, Artificial Sequence
  HTT spacer sequence GTCN PAM
gugagcccuuaagugggugu

SEQ ID NO: 27144 - RNA, 20 nt, Artificial Sequence
  HTT spacer sequence GTCN PAM
cuucucugucuccggcuacu

SEQ ID NO: 27145 - RNA, 20 nt, Artificial Sequence
  HTT spacer sequence GTCN PAM
ccggcuacuacagguaccug

SEQ ID NO: 27146 - RNA, 20 nt, Artificial Sequence
  HTT spacer sequence GTCN PAM
ucucucauucuagcccaagu

SEQ ID NO: 27147 - RNA, 20 nt, Artificial Sequence
  HTT spacer sequence GTCN PAM
ucccgcaucacugguguggu

SEQ ID NO: 27148 - RNA, 20 nt, Artificial Sequence
  HTT spacer sequence GTCN PAM
gaguuggaggcuguggugcu

SEQ ID NO: 27149 - RNA, 20 nt, Artificial Sequence
  HTT spacer sequence GTCN PAM
uagucaggcccagggaggaa

SEQ ID NO: 27150 - RNA, 20 nt, Artificial Sequence
  HTT spacer sequence GTCN PAM
ggcccagggaggaaguaaaa

SEQ ID NO: 27151 - RNA, 20 nt, Artificial Sequence
  HTT spacer sequence GTCN PAM
agaaaugagaagcgaaagaa

SEQ ID NO: 27152 - RNA, 20 nt, Artificial Sequence
  HTT spacer sequence GTCN PAM
uacagcccgugagaauucuu

SEQ ID NO: 27153 - RNA, 20 nt, Artificial Sequence
  HTT spacer sequence GTCN PAM
cugcccacucucccaccaag

SEQ ID NO: 27154 - RNA, 20 nt, Artificial Sequence
  HTT spacer sequence GTCN PAM
ccugguuuaaaagaagagag

SEQ ID NO: 27155 - RNA, 20 nt, Artificial Sequence
  HTT spacer sequence GTCN PAM
acauagaacuuucugcaauu

SEQ ID NO: 27156 - RNA, 20 nt, Artificial Sequence
  HTT spacer sequence GTCN PAM
augagacucaaauguuuauu

SEQ ID NO: 27157 - RNA, 20 nt, Artificial Sequence
  HTT spacer sequence GTCN PAM
cauagacacugcguauaaca

SEQ ID NO: 27158 - RNA, 20 nt, Artificial Sequence
  HTT spacer sequence GTCN PAM
ggaggacccaggagcaauga

SEQ ID NO: 27159 - RNA, 20 nt, Artificial Sequence
  HTT spacer sequence GTCN PAM
uccugacuuaugagcuccuu

SEQ ID NO: 27160 - RNA, 20 nt, Artificial Sequence
  HTT spacer sequence GTCN PAM
uugcuccuggguccuccuga

SEQ ID NO: 27161 - RNA, 20 nt, Artificial Sequence
  HTT spacer sequence GTCN PAM
uagaaggcagaaaagagggg

SEQ ID NO: 27162 - RNA, 20 nt, Artificial Sequence
  HTT spacer sequence GTCN PAM
ggcagaggguuagcugggga

SEQ ID NO: 27163 - RNA, 20 nt, Artificial Sequence
  HTT spacer sequence GTCN PAM
ccagcuaacccucugccaga

SEQ ID NO: 27164 - RNA, 20 nt, Artificial Sequence
  HTT spacer sequence GTCN PAM
uucugcugggcaucccccca

SEQ ID NO: 27165 - RNA, 20 nt, Artificial Sequence
  HTT spacer sequence GTCN PAM
gccugggcaccgaggugggg

SEQ ID NO: 27166 - RNA, 20 nt, Artificial Sequence
  HTT spacer sequence GTCN PAM
cccagagagcuugccugccu

SEQ ID NO: 27167 - RNA, 20 nt, Artificial Sequence
  HTT spacer sequence GTCN PAM
aggcaggcaagcucucuggg

SEQ ID NO: 27168 - RNA, 20 nt, Artificial Sequence
  HTT spacer sequence GTCN PAM
gcucgccugcaacugcugac

SEQ ID NO: 27169 - RNA, 20 nt, Artificial Sequence
  HTT spacer sequence GTCN PAM
gcaguugcaggcgagccgac

SEQ ID NO: 27170 - RNA, 20 nt, Artificial Sequence
  HTT spacer sequence GTCN PAM
ccccucagcucccaccucug

SEQ ID NO: 27171 - RNA, 20 nt, Artificial Sequence
  HTT spacer sequence GTCN PAM
cuugucaccccucagcuccc

SEQ ID NO: 27172 - RNA, 20 nt, Artificial Sequence
  HTT spacer sequence GTCN PAM
uauuugucauagagaaaaag

SEQ ID NO: 27173 - RNA, 20 nt, Artificial Sequence
  HTT spacer sequence GTCN PAM
uagagaaaaagugacagagu

SEQ ID NO: 27174 - RNA, 20 nt, Artificial Sequence
  HTT spacer sequence GTCN PAM
cuuuuucucuaugacaaaua

SEQ ID NO: 27175 - RNA, 20 nt, Artificial Sequence
  HTT spacer sequence GTCN PAM
agcuugcccacuggcccugc

SEQ ID NO: 27176 - RNA, 20 nt, Artificial Sequence
  HTT spacer sequence GTCN PAM
cuuuauaaccaguuaagcug

SEQ ID NO: 27177 - RNA, 20 nt, Artificial Sequence
  HTT spacer sequence GTCN PAM
uggggauuugucacuuuaua

SEQ ID NO: 27178 - RNA, 20 nt, Artificial Sequence
  HTT spacer sequence GTCN PAM
gggcaggagcugggcuggua

SEQ ID NO: 27179 - RNA, 20 nt, Artificial Sequence
  HTT spacer sequence GTCN PAM
ugaucugcacaggggggcag

SEQ ID NO: 27180 - RNA, 20 nt, Artificial Sequence
  HTT spacer sequence GTCN PAM
gucucgcgcccccgccgccu

SEQ ID NO: 27181 - RNA, 20 nt, Artificial Sequence
  HTT spacer sequence GTCN PAM
cgcgcccccgccgccuggcc

SEQ ID NO: 27182 - RNA, 20 nt, Artificial Sequence
  HTT spacer sequence GTCN PAM
guuucuguccucagacuuug

SEQ ID NO: 27183 - RNA, 20 nt, Artificial Sequence
  HTT spacer sequence GTCN PAM
ucagacuuuggcgcuugaca

SEQ ID NO: 27184 - RNA, 20 nt, Artificial Sequence
  HTT spacer sequence GTCN PAM
gaggacagaaacggacagag

SEQ ID NO: 27185 - RNA, 20 nt, Artificial Sequence
  HTT spacer sequence GTCN PAM
agcgccaaagucugaggaca

SEQ ID NO: 27186 - RNA, 20 nt, Artificial Sequence
  HTT spacer sequence GTCN PAM
cgcaagcagaggaagcauua

SEQ ID NO: 27187 - RNA, 20 nt, Artificial Sequence
  HTT spacer sequence GTCN PAM
cuuaacuacuuucuggaaua

SEQ ID NO: 27188 - RNA, 20 nt, Artificial Sequence
  HTT spacer sequence GTCN PAM
cuuacacacaucucuaucgc

SEQ ID NO: 27189 - RNA, 20 nt, Artificial Sequence
  HTT spacer sequence GTCN PAM
cgcccucucacugucucuua

SEQ ID NO: 27190 - RNA, 20 nt, Artificial Sequence
  HTT spacer sequence GTCN PAM
aagucacgcccucucacugu

SEQ ID NO: 27191 - RNA, 20 nt, Artificial Sequence
  HTT spacer sequence GTCN PAM
uugcuuaaguccaagucacg

SEQ ID NO: 27192 - RNA, 20 nt, Artificial Sequence
  HTT spacer sequence GTCN PAM
cacgguccuugcuuaagucc

SEQ ID NO: 27193 - RNA, 20 nt, Artificial Sequence
  HTT spacer sequence GTCN PAM
ucaccccccuuuuugugucu

SEQ ID NO: 27194 - RNA, 20 nt, Artificial Sequence
  HTT spacer sequence GTCN PAM
gcugaaaugcucaggaggaa

SEQ ID NO: 27195 - RNA, 20 nt, Artificial Sequence
  HTT spacer sequence GTCN PAM
acuuccuccugagcauuuca

SEQ ID NO: 27196 - RNA, 20 nt, Artificial Sequence
  HTT spacer sequence GTCN PAM
cuggggccagcucuuggggg

SEQ ID NO: 27197 - RNA, 20 nt, Artificial Sequence
  HTT spacer sequence GTCN PAM
cugucccuguggccaguucu

SEQ ID NO: 27198 - RNA, 20 nt, Artificial Sequence
  HTT spacer sequence GTCN PAM
cuguggccaguucugggugg

SEQ ID NO: 27199 - RNA, 20 nt, Artificial Sequence
  HTT spacer sequence GTCN PAM
gccugcacacggggcuccca

SEQ ID NO: 27200 - RNA, 20 nt, Artificial Sequence
  HTT spacer sequence GTCN PAM
cauuggucugugcuucuguu

SEQ ID NO: 27201 - RNA, 20 nt, Artificial Sequence
  HTT spacer sequence GTCN PAM
gugcuucuguuuccuccuca

SEQ ID NO: 27202 - RNA, 20 nt, Artificial Sequence
  HTT spacer sequence GTCN PAM
gggugugguggcuaacaccu

SEQ ID NO: 27203 - RNA, 20 nt, Artificial Sequence
  HTT spacer sequence GTCN PAM
guugcccaggcuggagugca

SEQ ID NO: 27204 - RNA, 20 nt, Artificial Sequence
  HTT spacer sequence GTCN PAM
cuuaaaaaaaaauguaaaca

SEQ ID NO: 27205 - RNA, 20 nt, Artificial Sequence
  HTT spacer sequence GTCN PAM
gccagcacagccgggccccg

SEQ ID NO: 27206 - RNA, 20 nt, Artificial Sequence
  HTT spacer sequence GTCN PAM
uucgcucaccggguuccuga

SEQ ID NO: 27207 - RNA, 20 nt, Artificial Sequence
  HTT spacer sequence GTCN PAM
ugcacaacugcuuucacuaa

SEQ ID NO: 27208 - RNA, 20 nt, Artificial Sequence
  HTT spacer sequence GTCN PAM
gaauaugguguuuagaaaca

SEQ ID NO: 27209 - RNA, 20 nt, Artificial Sequence
  HTT spacer sequence GTCN PAM
caagccuguuucuguucccu

SEQ ID NO: 27210 - RNA, 20 nt, Artificial Sequence
  HTT spacer sequence GTCN PAM
uguuuugugccugccgguuu

SEQ ID NO: 27211 - RNA, 20 nt, Artificial Sequence
  HTT spacer sequence GTCN PAM
cugaaaccggcaggcacaaa

SEQ ID NO: 27212 - RNA, 20 nt, Artificial Sequence
  HTT spacer sequence GTCN PAM
aguagcucccugcuuccugu

SEQ ID NO: 27213 - RNA, 20 nt, Artificial Sequence
  HTT spacer sequence GTCN PAM
agaaaaauacaggcuggucc

SEQ ID NO: 27214 - RNA, 20 nt, Artificial Sequence
  HTT spacer sequence GTCN PAM
cacucuucuguccuuucacc

SEQ ID NO: 27215 - RNA, 20 nt, Artificial Sequence
  HTT spacer sequence GTCN PAM
uuucaccuuugacagauguu

SEQ ID NO: 27216 - RNA, 20 nt, Artificial Sequence
  HTT spacer sequence GTCN PAM
aaggugaaaggacagaagag

SEQ ID NO: 27217 - RNA, 20 nt, Artificial Sequence
  HTT spacer sequence GTCN PAM
uuuucacuuaucuuggggug

SEQ ID NO: 27218 - RNA, 20 nt, Artificial Sequence
  HTT spacer sequence GTCN PAM
ugggcccagggacacugguc

SEQ ID NO: 27219 - RNA, 20 nt, Artificial Sequence
  HTT spacer sequence GTCN PAM
cugggcccaggacaaggcca

SEQ ID NO: 27220 - RNA, 20 nt, Artificial Sequence
  HTT spacer sequence GTCN PAM
gugcccgagguauucccuau

SEQ ID NO: 27221 - RNA, 20 nt, Artificial Sequence
  HTT spacer sequence GTCN PAM
agcguccgcaaaccaacugu

SEQ ID NO: 27222 - RNA, 20 nt, Artificial Sequence
  HTT spacer sequence GTCN PAM
gcaaaccaacugucauggga

SEQ ID NO: 27223 - RNA, 20 nt, Artificial Sequence
  HTT spacer sequence GTCN PAM
ugggaucauacuggggcuga

SEQ ID NO: 27224 - RNA, 20 nt, Artificial Sequence
  HTT spacer sequence GTCN PAM
caccccugcccugucugggg

SEQ ID NO: 27225 - RNA, 20 nt, Artificial Sequence
  HTT spacer sequence GTCN PAM
ggggcugaaguacagugcca

SEQ ID NO: 27226 - RNA, 20 nt, Artificial Sequence
  HTT spacer sequence GTCN PAM
ggggcugaaggacagugcca

SEQ ID NO: 27227 - RNA, 20 nt, Artificial Sequence
  HTT spacer sequence GTCN PAM
uucagccccagacagggcag

SEQ ID NO: 27228 - RNA, 20 nt, Artificial Sequence
  HTT spacer sequence GTCN PAM
ggggcugaaguacagugcca

SEQ ID NO: 27229 - RNA, 20 nt, Artificial Sequence
  HTT spacer sequence GTCN PAM
ggggcugaaggacagugcca

SEQ ID NO: 27230 - RNA, 20 nt, Artificial Sequence
  HTT spacer sequence GTCN PAM
uucagccccagacagggcag

SEQ ID NO: 27231 - RNA, 20 nt, Artificial Sequence
  HTT spacer sequence GTCN PAM
ggggcugaaggacagugcca

SEQ ID NO: 27232 - RNA, 20 nt, Artificial Sequence
  HTT spacer sequence GTCN PAM
uucagccccagacagggaag

SEQ ID NO: 27233 - RNA, 20 nt, Artificial Sequence
  HTT spacer sequence GTCN PAM
ggggcugaaggacagugcca

SEQ ID NO: 27234 - RNA, 20 nt, Artificial Sequence
  HTT spacer sequence GTCN PAM
uucagccccagacagggcag

SEQ ID NO: 27235 - RNA, 20 nt, Artificial Sequence
  HTT spacer sequence GTCN PAM
ggggcugaaggacagugcca

SEQ ID NO: 27236 - RNA, 20 nt, Artificial Sequence
  HTT spacer sequence GTCN PAM
uucagccccagacagggcag

SEQ ID NO: 27237 - RNA, 20 nt, Artificial Sequence
  HTT spacer sequence GTCN PAM
ggggcugaaggacagugcca

SEQ ID NO: 27238 - RNA, 20 nt, Artificial Sequence
  HTT spacer sequence GTCN PAM
uucagccccagacagggcag

SEQ ID NO: 27239 - RNA, 20 nt, Artificial Sequence
  HTT spacer sequence GTCN PAM
ggggcugaaggacagugcca

SEQ ID NO: 27240 - RNA, 20 nt, Artificial Sequence
  HTT spacer sequence GTCN PAM
uucagccccagacagggcag

SEQ ID NO: 27241 - RNA, 20 nt, Artificial Sequence
  HTT spacer sequence GTCN PAM
ggggcugaaggacagugcca

SEQ ID NO: 27242 - RNA, 20 nt, Artificial Sequence
  HTT spacer sequence GTCN PAM
uucagccccagacagggcag

SEQ ID NO: 27243 - RNA, 20 nt, Artificial Sequence
  HTT spacer sequence GTCN PAM
ggggcugaaggacagugcca

SEQ ID NO: 27244 - RNA, 20 nt, Artificial Sequence
  HTT spacer sequence GTCN PAM
uucagccccagacagggcag

SEQ ID NO: 27245 - RNA, 20 nt, Artificial Sequence
  HTT spacer sequence GTCN PAM
ggggcugaaggacagugcca

SEQ ID NO: 27246 - RNA, 20 nt, Artificial Sequence
  HTT spacer sequence GTCN PAM
uucagccccagacagggcag

SEQ ID NO: 27247 - RNA, 20 nt, Artificial Sequence
  HTT spacer sequence GTCN PAM
ggggcugaaggacagugcca

SEQ ID NO: 27248 - RNA, 20 nt, Artificial Sequence
  HTT spacer sequence GTCN PAM
uucagccccagacagggcag

SEQ ID NO: 27249 - RNA, 20 nt, Artificial Sequence
  HTT spacer sequence GTCN PAM
ggggcugaaggacagugcca

SEQ ID NO: 27250 - RNA, 20 nt, Artificial Sequence
  HTT spacer sequence GTCN PAM
uucagccccagacagggcag

SEQ ID NO: 27251 - RNA, 20 nt, Artificial Sequence
  HTT spacer sequence GTCN PAM
ggggcugaaggacagugcca

SEQ ID NO: 27252 - RNA, 20 nt, Artificial Sequence
  HTT spacer sequence GTCN PAM
uucagccccagacagggcag

SEQ ID NO: 27253 - RNA, 20 nt, Artificial Sequence
  HTT spacer sequence GTCN PAM
ggggcugaaggacagugcca

SEQ ID NO: 27254 - RNA, 20 nt, Artificial Sequence
  HTT spacer sequence GTCN PAM
uucagccccagacagggcag

SEQ ID NO: 27255 - RNA, 20 nt, Artificial Sequence
  HTT spacer sequence GTCN PAM
ggggcugaaggacagugcca

SEQ ID NO: 27256 - RNA, 20 nt, Artificial Sequence
  HTT spacer sequence GTCN PAM
uucagccccagacagggcag

SEQ ID NO: 27257 - RNA, 20 nt, Artificial Sequence
  HTT spacer sequence GTCN PAM
ggggcugaaggacagugcca

SEQ ID NO: 27258 - RNA, 20 nt, Artificial Sequence
  HTT spacer sequence GTCN PAM
uucagccccagacagggcag

SEQ ID NO: 27259 - RNA, 20 nt, Artificial Sequence
  HTT spacer sequence GTCN PAM
gggauguuuagccccuagau

SEQ ID NO: 27260 - RNA, 20 nt, Artificial Sequence
  HTT spacer sequence GTCN PAM
aguggcaucuaggggcuaaa

SEQ ID NO: 27261 - RNA, 20 nt, Artificial Sequence
  HTT spacer sequence GTCN PAM
gggcgaggggagugcagggg

SEQ ID NO: 27262 - RNA, 20 nt, Artificial Sequence
  HTT spacer sequence GTCN PAM
guaugaacagcucucaggcc

SEQ ID NO: 27263 - RNA, 20 nt, Artificial Sequence
  HTT spacer sequence GTCN PAM
caggggggaaauggcccuug

SEQ ID NO: 27264 - RNA, 20 nt, Artificial Sequence
  HTT spacer sequence GTCN PAM
uccuuucugccugguucucg

SEQ ID NO: 27265 - RNA, 20 nt, Artificial Sequence
  HTT spacer sequence GTCN PAM
aggugugcugacugcguggu

SEQ ID NO: 27266 - RNA, 20 nt, Artificial Sequence
  HTT spacer sequence GTCN PAM
gcacaccucgacuguccucc

SEQ ID NO: 27267 - RNA, 20 nt, Artificial Sequence
  HTT spacer sequence GTCN PAM
caaaggcgcgagggagcucu

SEQ ID NO: 27268 - RNA, 20 nt, Artificial Sequence
  HTT spacer sequence GTCN PAM
uugcgguaaacccaaggcca

SEQ ID NO: 27269 - RNA, 20 nt, Artificial Sequence
  HTT spacer sequence GTCN PAM
cccgcacuggcagucauugc

SEQ ID NO: 27270 - RNA, 20 nt, Artificial Sequence
  HTT spacer sequence GTCN PAM
ccaaaacacggaaccaauac

SEQ ID NO: 27271 - RNA, 20 nt, Artificial Sequence
  HTT spacer sequence GTCN PAM
cuuaggagugaaagcauccc

SEQ ID NO: 27272 - RNA, 20 nt, Artificial Sequence
  HTT spacer sequence GTCN PAM
cccuccucagcugcuccugg

SEQ ID NO: 27273 - RNA, 20 nt, Artificial Sequence
  HTT spacer sequence GTCN PAM
accccaggagcagcugagga

SEQ ID NO: 27274 - RNA, 20 nt, Artificial Sequence
  HTT spacer sequence GTCN PAM
agccccugccccacccucuc

SEQ ID NO: 27275 - RNA, 20 nt, Artificial Sequence
  HTT spacer sequence GTCN PAM
gaacgacccuugcuaagggg

SEQ ID NO: 27276 - RNA, 20 nt, Artificial Sequence
  HTT spacer sequence GTCN PAM
uucagacaccccagguuacg

SEQ ID NO: 27277 - RNA, 20 nt, Artificial Sequence
  HTT spacer sequence GTCN PAM
gccccuuagcaagggucguu

SEQ ID NO: 27278 - RNA, 20 nt, Artificial Sequence
  HTT spacer sequence GTCN PAM
aacagucugccccuuagcaa

SEQ ID NO: 27279 - RNA, 20 nt, Artificial Sequence
  HTT spacer sequence GTCN PAM
caguggccacacccacccac

SEQ ID NO: 27280 - RNA, 20 nt, Artificial Sequence
  HTT spacer sequence GTCN PAM
auacacuccguguggcuggg

SEQ ID NO: 27281 - RNA, 20 nt, Artificial Sequence
  HTT spacer sequence GTCN PAM
cauuccuccucccucagggg

SEQ ID NO: 27282 - RNA, 20 nt, Artificial Sequence
  HTT spacer sequence GTCN PAM
gccuccuccuccucuuccuc

SEQ ID NO: 27283 - RNA, 20 nt, Artificial Sequence
  HTT spacer sequence GTCN PAM
ccacccacgucuccagucaa

SEQ ID NO: 27284 - RNA, 20 nt, Artificial Sequence
  HTT spacer sequence GTCN PAM
ccagucaacuccagguuuuc

SEQ ID NO: 27285 - RNA, 20 nt, Artificial Sequence
  HTT spacer sequence GTCN PAM
acuccagguuuuccaauggc

SEQ ID NO: 27286 - RNA, 20 nt, Artificial Sequence
  HTT spacer sequence GTCN PAM
uuugauuuguuugaggugcu

SEQ ID NO: 27287 - RNA, 20 nt, Artificial Sequence
  HTT spacer sequence GTCN PAM
acuccagcccgguguuuccu

SEQ ID NO: 27288 - RNA, 20 nt, Artificial Sequence
  HTT spacer sequence GTCN PAM
agcucagccaggaggacccc

SEQ ID NO: 27289 - RNA, 20 nt, Artificial Sequence
  HTT spacer sequence GTCN PAM
uccuggcugagcuggacggc

SEQ ID NO: 27290 - RNA, 20 nt, Artificial Sequence
  HTT spacer sequence GTCN PAM
gauccguaagugagccuucc

SEQ ID NO: 27291 - RNA, 20 nt, Artificial Sequence
  HTT spacer sequence GTCN PAM
auggugcguguggccugugu

SEQ ID NO: 27292 - RNA, 20 nt, Artificial Sequence
  HTT spacer sequence GTCN PAM
ggugcaugcacauguggcau

SEQ ID NO: 27293 - RNA, 20 nt, Artificial Sequence
  HTT spacer sequence GTCN PAM
gugugggugcgugguacacg

SEQ ID NO: 27294 - RNA, 20 nt, Artificial Sequence
  HTT spacer sequence GTCN PAM
cgcacaguaaugucucuugg

SEQ ID NO: 27295 - RNA, 20 nt, Artificial Sequence
  HTT spacer sequence GTCN PAM
cuuggguguaagaacacgac

SEQ ID NO: 27296 - RNA, 20 nt, Artificial Sequence
  HTT spacer sequence GTCN PAM
uguucuuacacccaagagac

SEQ ID NO: 27297 - RNA, 20 nt, Artificial Sequence
  HTT spacer sequence GTCN PAM
cagacuuguucaccgagcgc

SEQ ID NO: 27298 - RNA, 20 nt, Artificial Sequence
  HTT spacer sequence GTCN PAM
gagaccacuagaagcuggag

SEQ ID NO: 27299 - RNA, 20 nt, Artificial Sequence
  HTT spacer sequence GTCN PAM
cauacaucagcucaaacugg

SEQ ID NO: 27300 - RNA, 20 nt, Artificial Sequence
  HTT spacer sequence GTCN PAM
gcgucacauacaucagcuca

SEQ ID NO: 27301 - RNA, 20 nt, Artificial Sequence
  HTT spacer sequence GTCN PAM
ucugaagggugcacccuucg

SEQ ID NO: 27302 - RNA, 20 nt, Artificial Sequence
  HTT spacer sequence GTCN PAM
uugggaugguaagugacagg

SEQ ID NO: 27303 - RNA, 20 nt, Artificial Sequence
  HTT spacer sequence GTCN PAM
cuuaccaucccaaggacggc

SEQ ID NO: 27304 - RNA, 20 nt, Artificial Sequence
  HTT spacer sequence GTCN PAM
caaggcagaugggcccccgu

SEQ ID NO: 27305 - RNA, 20 nt, Artificial Sequence
  HTT spacer sequence GTCN PAM
acucuuggaaggaggcagcc

SEQ ID NO: 27306 - RNA, 20 nt, Artificial Sequence
  HTT spacer sequence GTCN PAM
gguucgggucaacucuugga

SEQ ID NO: 27307 - RNA, 20 nt, Artificial Sequence
  HTT spacer sequence GTCN PAM
cugaacccccuccaucugag

SEQ ID NO: 27308 - RNA, 20 nt, Artificial Sequence
  HTT spacer sequence GTCN PAM
gugccauucacaggucacug

SEQ ID NO: 27309 - RNA, 20 nt, Artificial Sequence
  HTT spacer sequence GTCN PAM
cugugauguggguuguggcg

SEQ ID NO: 27310 - RNA, 20 nt, Artificial Sequence
  HTT spacer sequence GTCN PAM
cguaucccugggcuuaugac

SEQ ID NO: 27311 - RNA, 20 nt, Artificial Sequence
  HTT spacer sequence GTCN PAM
uaagcccagggauacgggac

SEQ ID NO: 27312 - RNA, 20 nt, Artificial Sequence
  HTT spacer sequence GTCN PAM
ggccucagggcagagcaugg

SEQ ID NO: 27313 - RNA, 20 nt, Artificial Sequence
  HTT spacer sequence GTCN PAM
agccaggaagcucggggggc

SEQ ID NO: 27314 - RNA, 20 nt, Artificial Sequence
  HTT spacer sequence GTCN PAM
cagugacccuguguuucuag

SEQ ID NO: 27315 - RNA, 20 nt, Artificial Sequence
  HTT spacer sequence GTCN PAM
cugugacaaaacggccccca

SEQ ID NO: 27316 - RNA, 20 nt, Artificial Sequence
  HTT spacer sequence GTCN PAM
caaaucugggugcuauaguc

SEQ ID NO: 27317 - RNA, 20 nt, Artificial Sequence
  HTT spacer sequence GTCN PAM
cuuuuuagcguggugguugu

SEQ ID NO: 27318 - RNA, 20 nt, Artificial Sequence
  HTT spacer sequence GTCN PAM
uagucuuuuuuggcugcuac

SEQ ID NO: 27319 - RNA, 20 nt, Artificial Sequence
  HTT spacer sequence GTCN PAM
uuuuuggcugcuaccacaag

SEQ ID NO: 27320 - RNA, 20 nt, Artificial Sequence
  HTT spacer sequence GTCN PAM
aagguaacuugugguagcag

SEQ ID NO: 27321 - RNA, 20 nt, Artificial Sequence
  HTT spacer sequence GTCN PAM
aggugccagcagauuuggug

SEQ ID NO: 27322 - RNA, 20 nt, Artificial Sequence
  HTT spacer sequence GTCN PAM
ucacgguggaaggagugaac

SEQ ID NO: 27323 - RNA, 20 nt, Artificial Sequence
  HTT spacer sequence GTCN PAM
ugaugggagagcccuugugg

SEQ ID NO: 27324 - RNA, 20 nt, Artificial Sequence
  HTT spacer sequence GTCN PAM
guguaggaguuucaggaggg

SEQ ID NO: 27325 - RNA, 20 nt, Artificial Sequence
  HTT spacer sequence GTCN PAM
gaauguuucuaucccuccug

SEQ ID NO: 27326 - RNA, 20 nt, Artificial Sequence
  HTT spacer sequence GTCN PAM
aguguucauccucuugaguu

SEQ ID NO: 27327 - RNA, 20 nt, Artificial Sequence
  HTT spacer sequence GTCN PAM
cgacaucuggcgaagcauau

SEQ ID NO: 27328 - RNA, 20 nt, Artificial Sequence
  HTT spacer sequence GTCN PAM
ggacccacgggcaaugauuu

SEQ ID NO: 27329 - RNA, 20 nt, Artificial Sequence
  HTT spacer sequence GTCN PAM
gagcuggcaccucugguucc

SEQ ID NO: 27330 - RNA, 20 nt, Artificial Sequence
  HTT spacer sequence GTCN PAM
uguggcauuaccuaguaauc

SEQ ID NO: 27331 - RNA, 20 nt, Artificial Sequence
  HTT spacer sequence GTCN PAM
ggggcccuuggugagaaugg

SEQ ID NO: 27332 - RNA, 20 nt, Artificial Sequence
  HTT spacer sequence GTCN PAM
agagcacgggcuaggcaggc

SEQ ID NO: 27333 - RNA, 20 nt, Artificial Sequence
  HTT spacer sequence GTCN PAM
ggaacgacaaugcugucaug

SEQ ID NO: 27334 - RNA, 20 nt, Artificial Sequence
  HTT spacer sequence GTCN PAM
uuccugacacacaggagccc

SEQ ID NO: 27335 - RNA, 20 nt, Artificial Sequence
  HTT spacer sequence GTCN PAM
ugacggugaaugauuuuuuu

SEQ ID NO: 27336 - RNA, 20 nt, Artificial Sequence
  HTT spacer sequence GTCN PAM
ugacagcauugucguuccug

SEQ ID NO: 27337 - RNA, 20 nt, Artificial Sequence
  HTT spacer sequence GTCN PAM
ggugggggugcgggaggaag

SEQ ID NO: 27338 - RNA, 20 nt, Artificial Sequence
  HTT spacer sequence GTCN PAM
cccuuggccuugucaggugg

SEQ ID NO: 27339 - RNA, 20 nt, Artificial Sequence
  HTT spacer sequence GTCN PAM
gagguuagcuggcuugucug

SEQ ID NO: 27340 - RNA, 20 nt, Artificial Sequence
  HTT spacer sequence GTCN PAM
gggucacacaaaaugcagca

SEQ ID NO: 27341 - RNA, 20 nt, Artificial Sequence
  HTT spacer sequence GTCN PAM
cacaaaaugcagcagagguu

SEQ ID NO: 27342 - RNA, 20 nt, Artificial Sequence
  HTT spacer sequence GTCN PAM
gugaccuggagccugacucc

SEQ ID NO: 27343 - RNA, 20 nt, Artificial Sequence
  HTT spacer sequence GTCN PAM
cggacaugugcucaccucaa

SEQ ID NO: 27344 - RNA, 20 nt, Artificial Sequence
  HTT spacer sequence GTCN PAM
ggcuccaggucacggacaug

SEQ ID NO: 27345 - RNA, 20 nt, Artificial Sequence
  HTT spacer sequence GTCN PAM
ugacugcucuugccuagacu

SEQ ID NO: 27346 - RNA, 20 nt, Artificial Sequence
  HTT spacer sequence GTCN PAM
agacucgcagagagggaguc

SEQ ID NO: 27347 - RNA, 20 nt, Artificial Sequence
  HTT spacer sequence GTCN PAM
aggcaagagcagucaagacu

SEQ ID NO: 27348 - RNA, 20 nt, Artificial Sequence
  HTT spacer sequence GTCN PAM
uccccgagcccaaacgccag

SEQ ID NO: 27349 - RNA, 20 nt, Artificial Sequence
  HTT spacer sequence GTCN PAM
ucuucccuuguggguguccu

SEQ ID NO: 27350 - RNA, 20 nt, Artificial Sequence
  HTT spacer sequence GTCN PAM
uucagccuggugccaugcug

SEQ ID NO: 27351 - RNA, 20 nt, Artificial Sequence
  HTT spacer sequence GTCN PAM
ccagcauggcaccaggcuga

SEQ ID NO: 27352 - RNA, 20 nt, Artificial Sequence
  HTT spacer sequence GTCN PAM
agggaguggaaacaauugag

SEQ ID NO: 27353 - RNA, 20 nt, Artificial Sequence
  HTT spacer sequence GTCN PAM
aagcggcucuuggaaggggu

SEQ ID NO: 27354 - RNA, 20 nt, Artificial Sequence
  HTT spacer sequence GTCN PAM
uucuccuuugugggaaguuu

SEQ ID NO: 27355 - RNA, 20 nt, Artificial Sequence
  HTT spacer sequence GTCN PAM
uggacacucacucccagcuc

SEQ ID NO: 27356 - RNA, 20 nt, Artificial Sequence
  HTT spacer sequence GTCN PAM
augaccauccugccuuagga

SEQ ID NO: 27357 - RNA, 20 nt, Artificial Sequence
  HTT spacer sequence GTCN PAM
ugcuugguacccacguaucc

SEQ ID NO: 27358 - RNA, 20 nt, Artificial Sequence
  HTT spacer sequence GTCN PAM
uuuugagguauuugcccacc

SEQ ID NO: 27359 - RNA, 20 nt, Artificial Sequence
  HTT spacer sequence GTCN PAM
ugauguggggcuuucagaag

SEQ ID NO: 27360 - RNA, 20 nt, Artificial Sequence
  HTT spacer sequence GTCN PAM
cacuucugaaagccccacau

SEQ ID NO: 27361 - RNA, 20 nt, Artificial Sequence
  HTT spacer sequence GTCN PAM
uuagggaggggccguguggc

SEQ ID NO: 27362 - RNA, 20 nt, Artificial Sequence
  HTT spacer sequence GTCN PAM
cuuccuucuugggcccccac

SEQ ID NO: 27363 - RNA, 20 nt, Artificial Sequence
  HTT spacer sequence GTCN PAM
uuguuccugggauggcuggg

SEQ ID NO: 27364 - RNA, 20 nt, Artificial Sequence
  HTT spacer sequence GTCN PAM
uccggccauuuccccugcgg

SEQ ID NO: 27365 - RNA, 20 nt, Artificial Sequence
  HTT spacer sequence GTCN PAM
ggccauuuccccugcggaga

SEQ ID NO: 27366 - RNA, 20 nt, Artificial Sequence
  HTT spacer sequence GTCN PAM
ccauagucuugggcugaagg

SEQ ID NO: 27367 - RNA, 20 nt, Artificial Sequence
  HTT spacer sequence GTCN PAM
ugggcugaaggagggugaca

SEQ ID NO: 27368 - RNA, 20 nt, Artificial Sequence
  HTT spacer sequence GTCN PAM
cccuccuucagcccaagacu

SEQ ID NO: 27369 - RNA, 20 nt, Artificial Sequence
  HTT spacer sequence GTCN PAM
gcaaggaaugucacccuccu

SEQ ID NO: 27370 - RNA, 20 nt, Artificial Sequence
  HTT spacer sequence GTCN PAM
ccucacuguuaaagagcaga

SEQ ID NO: 27371 - RNA, 20 nt, Artificial Sequence
  HTT spacer sequence GTCN PAM
auauuuaacccugcuagguu

SEQ ID NO: 27372 - RNA, 20 nt, Artificial Sequence
  HTT spacer sequence GTCN PAM
acuucaaccaaaauggccuc

SEQ ID NO: 27373 - RNA, 20 nt, Artificial Sequence
  HTT spacer sequence GTCN PAM
uggggaucccugauaguggu

SEQ ID NO: 27374 - RNA, 20 nt, Artificial Sequence
  HTT spacer sequence GTCN PAM
uucuagaaaagccuggggua

SEQ ID NO: 27375 - RNA, 20 nt, Artificial Sequence
  HTT spacer sequence GTCN PAM
cgaggacaccaggcuugagc

SEQ ID NO: 27376 - RNA, 20 nt, Artificial Sequence
  HTT spacer sequence GTCN PAM
ucgggacaucgccccauggg

SEQ ID NO: 27377 - RNA, 20 nt, Artificial Sequence
  HTT spacer sequence GTCN PAM
ugcaggacgcacuuaacucc

SEQ ID NO: 27378 - RNA, 20 nt, Artificial Sequence
  HTT spacer sequence GTCN PAM
ugcacgaccccgcugggaga

SEQ ID NO: 27379 - RNA, 20 nt, Artificial Sequence
  HTT spacer sequence GTCN PAM
cggcucacugugcggggagu

SEQ ID NO: 27380 - RNA, 20 nt, Artificial Sequence
  HTT spacer sequence GTCN PAM
ucgccaggaaagcacacuag

SEQ ID NO: 27381 - RNA, 20 nt, Artificial Sequence
  HTT spacer sequence GTCN PAM
ccaggaaagcacacuagaga

SEQ ID NO: 27382 - RNA, 20 nt, Artificial Sequence
  HTT spacer sequence GTCN PAM
cuagugugcuuuccuggcga

SEQ ID NO: 27383 - RNA, 20 nt, Artificial Sequence
  HTT spacer sequence GTCN PAM
gggcacgaggcaggcagagg

SEQ ID NO: 27384 - RNA, 20 nt, Artificial Sequence
  HTT spacer sequence GTCN PAM
agagucugggcacgaggcag

SEQ ID NO: 27385 - RNA, 20 nt, Artificial Sequence
  HTT spacer sequence GTCN PAM
caacaccagccaggggccag

SEQ ID NO: 27386 - RNA, 20 nt, Artificial Sequence
  HTT spacer sequence GTCN PAM
ccggccugcuguguagucuc

SEQ ID NO: 27387 - RNA, 20 nt, Artificial Sequence
  HTT spacer sequence GTCN PAM
cuucugcacacaagcgugag

SEQ ID NO: 27388 - RNA, 20 nt, Artificial Sequence
  HTT spacer sequence GTCN PAM
caguggcuccuccccacagc

SEQ ID NO: 27389 - RNA, 20 nt, Artificial Sequence
  HTT spacer sequence GTCN PAM
gugugugccuaggacaaggc

SEQ ID NO: 27390 - RNA, 20 nt, Artificial Sequence
  HTT spacer sequence GTCN PAM
uaggcacacacagacaaaag

SEQ ID NO: 27391 - RNA, 20 nt, Artificial Sequence
  HTT spacer sequence GTCN PAM
gccgccugcuggagagcacg

SEQ ID NO: 27392 - RNA, 20 nt, Artificial Sequence
  HTT spacer sequence GTCN PAM
ucuaugugcuggagugcgac

SEQ ID NO: 27393 - RNA, 20 nt, Artificial Sequence
  HTT spacer sequence GTCN PAM
cacuccagcacauagaggac

SEQ ID NO: 27394 - RNA, 20 nt, Artificial Sequence
  HTT spacer sequence GTCN PAM
agcaggucgcacuccagcac

SEQ ID NO: 27395 - RNA, 20 nt, Artificial Sequence
  HTT spacer sequence GTCN PAM
uccagcaggucgcacuccag

SEQ ID NO: 27396 - RNA, 20 nt, Artificial Sequence
  HTT spacer sequence GTCN PAM
ucagcgacuaucuccucucc

SEQ ID NO: 27397 - RNA, 20 nt, Artificial Sequence
  HTT spacer sequence GTCN PAM
cugaugaccgggaugagcug

SEQ ID NO: 27398 - RNA, 20 nt, Artificial Sequence
  HTT spacer sequence GTCN PAM
cagaaugagcugugaaggaa

SEQ ID NO: 27399 - RNA, 20 nt, Artificial Sequence
  HTT spacer sequence GTCN PAM
gugagacgcaagagcacagg

SEQ ID NO: 27400 - RNA, 20 nt, Artificial Sequence
  HTT spacer sequence GTCN PAM
cacugaccucagccauggca

SEQ ID NO: 27401 - RNA, 20 nt, Artificial Sequence
  HTT spacer sequence GTCN PAM
uagaggcuuccucgggcacc

SEQ ID NO: 27402 - RNA, 20 nt, Artificial Sequence
  HTT spacer sequence GTCN PAM
cauguggcgcuuagcacacu

SEQ ID NO: 27403 - RNA, 20 nt, Artificial Sequence
  HTT spacer sequence GTCN PAM
ggaaugggcacgugggagag

SEQ ID NO: 27404 - RNA, 20 nt, Artificial Sequence
  HTT spacer sequence GTCN PAM
gaaucacaguggaaacaaga

SEQ ID NO: 27405 - RNA, 20 nt, Artificial Sequence
  HTT spacer sequence GTCN PAM
agcagcuuuaagauaaggug

SEQ ID NO: 27406 - RNA, 20 nt, Artificial Sequence
  HTT spacer sequence GTCN PAM
uugacaaagcacggcuggug

SEQ ID NO: 27407 - RNA, 20 nt, Artificial Sequence
  HTT spacer sequence GTCN PAM
aggacacguguguacagaac

SEQ ID NO: 27408 - RNA, 20 nt, Artificial Sequence
  HTT spacer sequence GTCN PAM
agcucuucacagcgaugucu

SEQ ID NO: 27409 - RNA, 20 nt, Artificial Sequence
  HTT spacer sequence GTCN PAM
uacaagcgcagagggcucug

SEQ ID NO: 27410 - RNA, 20 nt, Artificial Sequence
  HTT spacer sequence GTCN PAM
cagagcccucugcgcuugua

SEQ ID NO: 27411 - RNA, 20 nt, Artificial Sequence
  HTT spacer sequence GTCN PAM
caccgccacucuuccaaagu

SEQ ID NO: 27412 - RNA, 20 nt, Artificial Sequence
  HTT spacer sequence GTCN PAM
cagaggcuuuagcagagaug

SEQ ID NO: 27413 - RNA, 20 nt, Artificial Sequence
  HTT spacer sequence GTCN PAM
uaggcuucugcacacgggag

SEQ ID NO: 27414 - RNA, 20 nt, Artificial Sequence
  HTT spacer sequence GTCN PAM
uuagagggaggguggaauuu

SEQ ID NO: 27415 - RNA, 20 nt, Artificial Sequence
  HTT spacer sequence GTCN PAM
gggaggaauggccagugauc

SEQ ID NO: 27416 - RNA, 20 nt, Artificial Sequence
  HTT spacer sequence GTCN PAM
aaggggaucacuggccauuc

SEQ ID NO: 27417 - RNA, 20 nt, Artificial Sequence
  HTT spacer sequence GTCN PAM
aaguugaguggaagaccugg

SEQ ID NO: 27418 - RNA, 20 nt, Artificial Sequence
  HTT spacer sequence GTCN PAM
uccacucaacuuugaccuag

SEQ ID NO: 27419 - RNA, 20 nt, Artificial Sequence
  HTT spacer sequence GTCN PAM
cccuccaggucuuccacuca

SEQ ID NO: 27420 - RNA, 20 nt, Artificial Sequence
  HTT spacer sequence GTCN PAM
cuguaggcacaguucagaca

SEQ ID NO: 27421 - RNA, 20 nt, Artificial Sequence
  HTT spacer sequence GTCN PAM
gaacugugccuacagagacc

SEQ ID NO: 27422 - RNA, 20 nt, Artificial Sequence
  HTT spacer sequence GTCN PAM
ggcaggauuugggacaugcu

SEQ ID NO: 27423 - RNA, 20 nt, Artificial Sequence
  HTT spacer sequence GTCN PAM
caaauccugccagacggcca

SEQ ID NO: 27424 - RNA, 20 nt, Artificial Sequence
  HTT spacer sequence GTCN PAM
cugcuccagcaugucccaaa

SEQ ID NO: 27425 - RNA, 20 nt, Artificial Sequence
  HTT spacer sequence GTCN PAM
caagcccguggggaggcccu

SEQ ID NO: 27426 - RNA, 20 nt, Artificial Sequence
  HTT spacer sequence GTCN PAM
uccuugcugggcagugggug

SEQ ID NO: 27427 - RNA, 20 nt, Artificial Sequence
  HTT spacer sequence GTCN PAM
ugcuagcacagcacccacug

SEQ ID NO: 27428 - RNA, 20 nt, Artificial Sequence
  HTT spacer sequence GTCN PAM
gccuguccugcuagcacagc

SEQ ID NO: 27429 - RNA, 20 nt, Artificial Sequence
  HTT spacer sequence GTCN PAM
cugcaucccuggagccuggc

SEQ ID NO: 27430 - RNA, 20 nt, Artificial Sequence
  HTT spacer sequence GTCN PAM
cacggggcacaggccugcaa

SEQ ID NO: 27431 - RNA, 20 nt, Artificial Sequence
  HTT spacer sequence GTCN PAM
cugcaccaacauaugugccu

SEQ ID NO: 27432 - RNA, 20 nt, Artificial Sequence
  HTT spacer sequence GTCN PAM
ggggccuguucuggggcugc

SEQ ID NO: 27433 - RNA, 20 nt, Artificial Sequence
  HTT spacer sequence GTCN PAM
uccaugcccacagcaagagc

SEQ ID NO: 27434 - RNA, 20 nt, Artificial Sequence
  HTT spacer sequence GTCN PAM
aggaguugcguuugggaugc

SEQ ID NO: 27435 - RNA, 20 nt, Artificial Sequence
  HTT spacer sequence GTCN PAM
gccccacgcaccauuucuac

SEQ ID NO: 27436 - RNA, 20 nt, Artificial Sequence
  HTT spacer sequence GTCN PAM
cgugccuccgagguggaggu

SEQ ID NO: 27437 - RNA, 20 nt, Artificial Sequence
  HTT spacer sequence GTCN PAM
caccuccaccucggaggcac

SEQ ID NO: 27438 - RNA, 20 nt, Artificial Sequence
  HTT spacer sequence GTCN PAM
ccacguggucccaccuccac

SEQ ID NO: 27439 - RNA, 20 nt, Artificial Sequence
  HTT spacer sequence GTCN PAM
cuggcuaccagguccucacu

SEQ ID NO: 27440 - RNA, 20 nt, Artificial Sequence
  HTT spacer sequence GTCN PAM
ucacugugccauggggaagg

SEQ ID NO: 27441 - RNA, 20 nt, Artificial Sequence
  HTT spacer sequence GTCN PAM
ggggaucacagaaggcagca

SEQ ID NO: 27442 - RNA, 20 nt, Artificial Sequence
  HTT spacer sequence GTCN PAM
ugauggcaugugccaugaag

SEQ ID NO: 27443 - RNA, 20 nt, Artificial Sequence
  HTT spacer sequence GTCN PAM
ccucuacuuccugagugccc

SEQ ID NO: 27444 - RNA, 20 nt, Artificial Sequence
  HTT spacer sequence GTCN PAM
cucaacgaggcccuagauuc

SEQ ID NO: 27445 - RNA, 20 nt, Artificial Sequence
  HTT spacer sequence GTCN PAM
accuccccaacgcccugccc

SEQ ID NO: 27446 - RNA, 20 nt, Artificial Sequence
  HTT spacer sequence GTCN PAM
agcagaggcugaagggucag

SEQ ID NO: 27447 - RNA, 20 nt, Artificial Sequence
  HTT spacer sequence GTCN PAM
ggccagguugcaggggccug

SEQ ID NO: 27448 - RNA, 20 nt, Artificial Sequence
  HTT spacer sequence GTCN PAM
ggccccacgcgggaguguag

SEQ ID NO: 27449 - RNA, 20 nt, Artificial Sequence
  HTT spacer sequence GTCN PAM
cccguuuucagcugcgugaa

SEQ ID NO: 27450 - RNA, 20 nt, Artificial Sequence
  HTT spacer sequence GTCN PAM
ugugugccacugcguuuuac

SEQ ID NO: 27451 - RNA, 20 nt, Artificial Sequence
  HTT spacer sequence GTCN PAM
agaggauaguucucaaugag

SEQ ID NO: 27452 - RNA, 20 nt, Artificial Sequence
  HTT spacer sequence GTCN PAM
uccucugcacacggggagug

SEQ ID NO: 27453 - RNA, 20 nt, Artificial Sequence
  HTT spacer sequence GTCN PAM
aaacuggcccacugguauga

SEQ ID NO: 27454 - RNA, 20 nt, Artificial Sequence
  HTT spacer sequence GTCN PAM
ggaggaggcaugaacaccug

SEQ ID NO: 27455 - RNA, 20 nt, Artificial Sequence
  HTT spacer sequence GTCN PAM
cagguguucaugccuccucc

SEQ ID NO: 27456 - RNA, 20 nt, Artificial Sequence
  HTT spacer sequence GTCN PAM
aagaaucgcugcacagucuc

SEQ ID NO: 27457 - RNA, 20 nt, Artificial Sequence
  HTT spacer sequence GTCN PAM
ggaagugaggaguccacccc

SEQ ID NO: 27458 - RNA, 20 nt, Artificial Sequence
  HTT spacer sequence GTCN PAM
acccccuccaucauuuacca

SEQ ID NO: 27459 - RNA, 20 nt, Artificial Sequence
  HTT spacer sequence GTCN PAM
agcugaguguggacagagug

SEQ ID NO: 27460 - RNA, 20 nt, Artificial Sequence
  HTT spacer sequence GTCN PAM
acacucagcuugaccagcga

SEQ ID NO: 27461 - RNA, 20 nt, Artificial Sequence
  HTT spacer sequence GTCN PAM
uguucaagggaggcaggagc

SEQ ID NO: 27462 - RNA, 20 nt, Artificial Sequence
  HTT spacer sequence GTCN PAM
cuugagugagcaugcuccug

SEQ ID NO: 27463 - RNA, 20 nt, Artificial Sequence
  HTT spacer sequence GTCN PAM
aggucccuugagugagcaug

SEQ ID NO: 27464 - RNA, 20 nt, Artificial Sequence
  HTT spacer sequence GTCN PAM
ggguugaccgucccuguggu

SEQ ID NO: 27465 - RNA, 20 nt, Artificial Sequence
  HTT spacer sequence GTCN PAM
acccugaccagguacuccag

SEQ ID NO: 27466 - RNA, 20 nt, Artificial Sequence
  HTT spacer sequence GTCN PAM
cuguggucacucaucccaug

SEQ ID NO: 27467 - RNA, 20 nt, Artificial Sequence
  HTT spacer sequence GTCN PAM
cucaucccauguggcugagc

SEQ ID NO: 27468 - RNA, 20 nt, Artificial Sequence
  HTT spacer sequence GTCN PAM
ugggcaagcaaggggcugau

SEQ ID NO: 27469 - RNA, 20 nt, Artificial Sequence
  HTT spacer sequence GTCN PAM
cuggagaucugaaagcaggu

SEQ ID NO: 27470 - RNA, 20 nt, Artificial Sequence
  HTT spacer sequence GTCN PAM
agugagucccuggagaucug

SEQ ID NO: 27471 - RNA, 20 nt, Artificial Sequence
  HTT spacer sequence GTCN PAM
acagagccuauuggguugua

SEQ ID NO: 27472 - RNA, 20 nt, Artificial Sequence
  HTT spacer sequence GTCN PAM
guccggguagaacuucagac

SEQ ID NO: 27473 - RNA, 20 nt, Artificial Sequence
  HTT spacer sequence GTCN PAM
ggguagaacuucagacccua

SEQ ID NO: 27474 - RNA, 20 nt, Artificial Sequence
  HTT spacer sequence GTCN PAM
gaaguucuacccggacugac

SEQ ID NO: 27475 - RNA, 20 nt, Artificial Sequence
  HTT spacer sequence GTCN PAM
ggggcugcaggauuaggguc

SEQ ID NO: 27476 - RNA, 20 nt, Artificial Sequence
  HTT spacer sequence GTCN PAM
gugauuguugcuauggagcg

SEQ ID NO: 27477 - RNA, 20 nt, Artificial Sequence
  HTT spacer sequence GTCN PAM
gcugauccccuggcgcuguu

SEQ ID NO: 27478 - RNA, 20 nt, Artificial Sequence
  HTT spacer sequence GTCN PAM
ugccagugauuccccaccac

SEQ ID NO: 27479 - RNA, 20 nt, Artificial Sequence
  HTT spacer sequence GTCN PAM
ggcugugguggggaaucacu

SEQ ID NO: 27480 - RNA, 20 nt, Artificial Sequence
  HTT spacer sequence GTCN PAM
uuggaccccagcacucaggu

SEQ ID NO: 27481 - RNA, 20 nt, Artificial Sequence
  HTT spacer sequence GTCN PAM
aaggaccaccagcucgccag

SEQ ID NO: 27482 - RNA, 20 nt, Artificial Sequence
  HTT spacer sequence GTCN PAM
acgcuacaccugagugcugg

SEQ ID NO: 27483 - RNA, 20 nt, Artificial Sequence
  HTT spacer sequence GTCN PAM
cagugccugcccaucucucc

SEQ ID NO: 27484 - RNA, 20 nt, Artificial Sequence
  HTT spacer sequence GTCN PAM
cugagcccucaggagagaug

SEQ ID NO: 27485 - RNA, 20 nt, Artificial Sequence
  HTT spacer sequence GTCN PAM
uuccugcccccugccacacc

SEQ ID NO: 27486 - RNA, 20 nt, Artificial Sequence
  HTT spacer sequence GTCN PAM
caaagaugcauguguggguu

SEQ ID NO: 27487 - RNA, 20 nt, Artificial Sequence
  HTT spacer sequence GTCN PAM
guggcuucugccccccacca

SEQ ID NO: 27488 - RNA, 20 nt, Artificial Sequence
  HTT spacer sequence GTCN PAM
uugagaaaaagcccuaccaa

SEQ ID NO: 27489 - RNA, 20 nt, Artificial Sequence
  HTT spacer sequence GTCN PAM
uggcgacaugguggaucugg

SEQ ID NO: 27490 - RNA, 20 nt, Artificial Sequence
  HTT spacer sequence GTCN PAM
ccaggacugaggccugagag

SEQ ID NO: 27491 - RNA, 20 nt, Artificial Sequence
  HTT spacer sequence GTCN PAM
accugaguaugcucuugaga

SEQ ID NO: 27492 - RNA, 20 nt, Artificial Sequence
  HTT spacer sequence GTCN PAM
aacaguggagcaagguccac

SEQ ID NO: 27493 - RNA, 20 nt, Artificial Sequence
  HTT spacer sequence GTCN PAM
guuuucauguugauuuuuuu

SEQ ID NO: 27494 - RNA, 20 nt, Artificial Sequence
  HTT spacer sequence GTCN PAM
cccaggcuggagugcaaugg

SEQ ID NO: 27495 - RNA, 20 nt, Artificial Sequence
  HTT spacer sequence GTCN PAM
cuacuaaaaacacaaaaauu

SEQ ID NO: 27496 - RNA, 20 nt, Artificial Sequence
  HTT spacer sequence GTCN PAM
cgaacuccugaacucaagug

SEQ ID NO: 27497 - RNA, 20 nt, Artificial Sequence
  HTT spacer sequence GTCN PAM
auuuuuaaaugcaccucugc

SEQ ID NO: 27498 - RNA, 20 nt, Artificial Sequence
  HTT spacer sequence GTCN PAM
ccauaugcucacugagcacc

SEQ ID NO: 27499 - RNA, 20 nt, Artificial Sequence
  HTT spacer sequence GTCN PAM
caguggugcucagugagcau

SEQ ID NO: 27500 - RNA, 20 nt, Artificial Sequence
  HTT spacer sequence GTCN PAM
gccagucgcaguggugcuca

SEQ ID NO: 27501 - RNA, 20 nt, Artificial Sequence
  HTT spacer sequence GTCN PAM
uggcgccucccugugcccgu

SEQ ID NO: 27502 - RNA, 20 nt, Artificial Sequence
  HTT spacer sequence GTCN PAM
uggccuucaaggggcuugug

SEQ ID NO: 27503 - RNA, 20 nt, Artificial Sequence
  HTT spacer sequence GTCN PAM
agugggcccaaugcuaggug

SEQ ID NO: 27504 - RNA, 20 nt, Artificial Sequence
  HTT spacer sequence GTCN PAM
agcggaaggcgugcaccaca

SEQ ID NO: 27505 - RNA, 20 nt, Artificial Sequence
  HTT spacer sequence GTCN PAM
ggagagcggucaagcggaag

SEQ ID NO: 27506 - RNA, 20 nt, Artificial Sequence
  HTT spacer sequence GTCN PAM
gcugcgaggugccucccugu

SEQ ID NO: 27507 - RNA, 20 nt, Artificial Sequence
  HTT spacer sequence GTCN PAM
ucagagcggcugccaugcca

SEQ ID NO: 27508 - RNA, 20 nt, Artificial Sequence
  HTT spacer sequence GTCN PAM
gcgggcggguagagccagga

SEQ ID NO: 27509 - RNA, 20 nt, Artificial Sequence
  HTT spacer sequence GTCN PAM
caguuacacacggcuggcau

SEQ ID NO: 27510 - RNA, 20 nt, Artificial Sequence
  HTT spacer sequence GTCN PAM
caucagugcacacaugccag

SEQ ID NO: 27511 - RNA, 20 nt, Artificial Sequence
  HTT spacer sequence GTCN PAM
ugguugacaacagugccacg

SEQ ID NO: 27512 - RNA, 20 nt, Artificial Sequence
  HTT spacer sequence GTCN PAM
accaggacuuuuuucuuguu

SEQ ID NO: 27513 - RNA, 20 nt, Artificial Sequence
  HTT spacer sequence GTCN PAM
cuacagggcgugggagccca

SEQ ID NO: 27514 - RNA, 20 nt, Artificial Sequence
  HTT spacer sequence GTCN PAM
cuacagggugugggagccca

SEQ ID NO: 27515 - RNA, 20 nt, Artificial Sequence
  HTT spacer sequence GTCN PAM
agcucguggaggcaggcugc

SEQ ID NO: 27516 - RNA, 20 nt, Artificial Sequence
  HTT spacer sequence GTCN PAM
caaaauucguacuccaguug

SEQ ID NO: 27517 - RNA, 20 nt, Artificial Sequence
  HTT spacer sequence GTCN PAM
gagccuaagcaacuggagua

SEQ ID NO: 27518 - RNA, 20 nt, Artificial Sequence
  HTT spacer sequence GTCN PAM
cucacggccgagggucccuc

SEQ ID NO: 27519 - RNA, 20 nt, Artificial Sequence
  HTT spacer sequence GTCN PAM
cucccagcccugauuucaca

SEQ ID NO: 27520 - RNA, 20 nt, Artificial Sequence
  HTT spacer sequence GTCN PAM
cugaccugcgucccuccucc

SEQ ID NO: 27521 - RNA, 20 nt, Artificial Sequence
  HTT spacer sequence GTCN PAM
gagacuggcaccagcuccca

SEQ ID NO: 27522 - RNA, 20 nt, Artificial Sequence
  HTT spacer sequence GTCN PAM
cuccucccaggaucaggaaa

SEQ ID NO: 27523 - RNA, 20 nt, Artificial Sequence
  HTT spacer sequence GTCN PAM
agaaacuggggcaggauccu

SEQ ID NO: 27524 - RNA, 20 nt, Artificial Sequence
  HTT spacer sequence GTCN PAM
ucuagaaacuggggcaggau

SEQ ID NO: 27525 - RNA, 20 nt, Artificial Sequence
  HTT spacer sequence GTCN PAM
uggggugggaagaagucguc

SEQ ID NO: 27526 - RNA, 20 nt, Artificial Sequence
  HTT spacer sequence GTCN PAM
ucggagaguuucuguccaac

SEQ ID NO: 27527 - RNA, 20 nt, Artificial Sequence
  HTT spacer sequence GTCN PAM
aaccagcagccauaccccca

SEQ ID NO: 27528 - RNA, 20 nt, Artificial Sequence
  HTT spacer sequence GTCN PAM
gaggcaacuccaccuccagg

SEQ ID NO: 27529 - RNA, 20 nt, Artificial Sequence
  HTT spacer sequence GTCN PAM
ccccagcccugacacucagg

SEQ ID NO: 27530 - RNA, 20 nt, Artificial Sequence
  HTT spacer sequence GTCN PAM
gggcuggggggacgggaagc

SEQ ID NO: 27531 - RNA, 20 nt, Artificial Sequence
  HTT spacer sequence GTCN PAM
gaaacaccugcaaggagcaa

SEQ ID NO: 27532 - RNA, 20 nt, Artificial Sequence
  HTT spacer sequence GTCN PAM
uccaugguccgggacugggu

SEQ ID NO: 27533 - RNA, 20 nt, Artificial Sequence
  HTT spacer sequence GTCN PAM
augguccgggacugggucau

SEQ ID NO: 27534 - RNA, 20 nt, Artificial Sequence
  HTT spacer sequence GTCN PAM
gggacugggucaugcugucc

SEQ ID NO: 27535 - RNA, 20 nt, Artificial Sequence
  HTT spacer sequence GTCN PAM
cggaccauggacgacugccc

SEQ ID NO: 27536 - RNA, 20 nt, Artificial Sequence
  HTT spacer sequence GTCN PAM
ugcugucccucuccaacuuc

SEQ ID NO: 27537 - RNA, 20 nt, Artificial Sequence
  HTT spacer sequence GTCN PAM
cucuccaacuucacgcagag

SEQ ID NO: 27538 - RNA, 20 nt, Artificial Sequence
  HTT spacer sequence GTCN PAM
ccauggccacguggagccuc

SEQ ID NO: 27539 - RNA, 20 nt, Artificial Sequence
  HTT spacer sequence GTCN PAM
gcgcguccaccagcccgugg

SEQ ID NO: 27540 - RNA, 20 nt, Artificial Sequence
  HTT spacer sequence GTCN PAM
accagcccgugggucgcggc

SEQ ID NO: 27541 - RNA, 20 nt, Artificial Sequence
  HTT spacer sequence GTCN PAM
cggcgauguauccucucugg

SEQ ID NO: 27542 - RNA, 20 nt, Artificial Sequence
  HTT spacer sequence GTCN PAM
cuggugcuggccccguuucc

SEQ ID NO: 27543 - RNA, 20 nt, Artificial Sequence
  HTT spacer sequence GTCN PAM
acaccgaggcucauguuuca

SEQ ID NO: 27544 - RNA, 20 nt, Artificial Sequence
  HTT spacer sequence GTCN PAM
cccuggcaucugugggguuu

SEQ ID NO: 27545 - RNA, 20 nt, Artificial Sequence
  HTT spacer sequence GTCN PAM
gcauuuuacuucccuggggc

SEQ ID NO: 27546 - RNA, 20 nt, Artificial Sequence
  HTT spacer sequence GTCN PAM
agacauuugcugaccagggc

SEQ ID NO: 27547 - RNA, 20 nt, Artificial Sequence
  HTT spacer sequence GTCN PAM
ggacgugcuccuuucuguac

SEQ ID NO: 27548 - RNA, 20 nt, Artificial Sequence
  HTT spacer sequence GTCN PAM
gcaaaugucuggacgugcuc

SEQ ID NO: 27549 - RNA, 20 nt, Artificial Sequence
  HTT spacer sequence GTCN PAM
cagcugaggggccuuucugu

SEQ ID NO: 27550 - RNA, 20 nt, Artificial Sequence
  HTT spacer sequence GTCN PAM
cugcagacgucccgcccacu

SEQ ID NO: 27551 - RNA, 20 nt, Artificial Sequence
  HTT spacer sequence GTCN PAM
gcagagaccaccgcccaccc

SEQ ID NO: 27552 - RNA, 20 nt, Artificial Sequence
  HTT spacer sequence GTCN PAM
cgcccacucgcgggcucugu

SEQ ID NO: 27553 - RNA, 20 nt, Artificial Sequence
  HTT spacer sequence GTCN PAM
ggagaagcccagccacacag

SEQ ID NO: 27554 - RNA, 20 nt, Artificial Sequence
  HTT spacer sequence GTCN PAM
uugugccucgaucgcccucu

SEQ ID NO: 27555 - RNA, 20 nt, Artificial Sequence
  HTT spacer sequence GTCN PAM
uggggaagggcuguggaaag

SEQ ID NO: 27556 - RNA, 20 nt, Artificial Sequence
  HTT spacer sequence GTCN PAM
gucuuggggaagggcugugg

SEQ ID NO: 27557 - RNA, 20 nt, Artificial Sequence
  HTT spacer sequence GTCN PAM
uggugcugacagcacagccu

SEQ ID NO: 27558 - RNA, 20 nt, Artificial Sequence
  HTT spacer sequence GTCN PAM
gcaccaggacaacugugcug

SEQ ID NO: 27559 - RNA, 20 nt, Artificial Sequence
  HTT spacer sequence GTCN PAM
agggagccuggagagcgagc

SEQ ID NO: 27560 - RNA, 20 nt, Artificial Sequence
  HTT spacer sequence GTCN PAM
acaaagggguccagggagcc

SEQ ID NO: 27561 - RNA, 20 nt, Artificial Sequence
  HTT spacer sequence GTCN PAM
ucaccugggaguuccucucc

SEQ ID NO: 27562 - RNA, 20 nt, Artificial Sequence
  HTT spacer sequence GTCN PAM
ucagcaggaugggcaagcug

SEQ ID NO: 27563 - RNA, 20 nt, Artificial Sequence
  HTT spacer sequence GTCN PAM
accugcuccagcuugcccau

SEQ ID NO: 27564 - RNA, 20 nt, Artificial Sequence
  HTT spacer sequence GTCN PAM
ccacagacuucuacagacac

SEQ ID NO: 27565 - RNA, 20 nt, Artificial Sequence
  HTT spacer sequence GTCN PAM
guggcgaccaggcagaaaag

SEQ ID NO: 27566 - RNA, 20 nt, Artificial Sequence
  HTT spacer sequence GTCN PAM
guagaagucuguggcgacca

SEQ ID NO: 27567 - RNA, 20 nt, Artificial Sequence
  HTT spacer sequence GTCN PAM
agcuccuccucuaucuggug

SEQ ID NO: 27568 - RNA, 20 nt, Artificial Sequence
  HTT spacer sequence GTCN PAM
gugcuugaggugguugcagc

SEQ ID NO: 27569 - RNA, 20 nt, Artificial Sequence
  HTT spacer sequence GTCN PAM
gcagccggugauaugggcuu

SEQ ID NO: 27570 - RNA, 20 nt, Artificial Sequence
  HTT spacer sequence GTCN PAM
acaaggucaccaccugcuga

SEQ ID NO: 27571 - RNA, 20 nt, Artificial Sequence
  HTT spacer sequence GTCN PAM
ccaccugcugagcgccaugg

SEQ ID NO: 27572 - RNA, 20 nt, Artificial Sequence
  HTT spacer sequence GTCN PAM
cucccaccauggcgcucagc

SEQ ID NO: 27573 - RNA, 20 nt, Artificial Sequence
  HTT spacer sequence GTCN PAM
gcgcccuugugcccugccuc

SEQ ID NO: 27574 - RNA, 20 nt, Artificial Sequence
  HTT spacer sequence GTCN PAM
cuaugggcuuccgcacaugc

SEQ ID NO: 27575 - RNA, 20 nt, Artificial Sequence
  HTT spacer sequence GTCN PAM
cugccauguggcagaagugc

SEQ ID NO: 27576 - RNA, 20 nt, Artificial Sequence
  HTT spacer sequence GTCN PAM
gcaguccugguggggcugag

SEQ ID NO: 27577 - RNA, 20 nt, Artificial Sequence
  HTT spacer sequence GTCN PAM
ugguggggcugagccugagg

SEQ ID NO: 27578 - RNA, 20 nt, Artificial Sequence
  HTT spacer sequence GTCN PAM
cccacauggggugcagcaca

SEQ ID NO: 27579 - RNA, 20 nt, Artificial Sequence
  HTT spacer sequence GTCN PAM
uuucuccugauagucaccug

SEQ ID NO: 27580 - RNA, 20 nt, Artificial Sequence
  HTT spacer sequence GTCN PAM
ccugcugguuguugccaggu

SEQ ID NO: 27581 - RNA, 20 nt, Artificial Sequence
  HTT spacer sequence GTCN PAM
ucccuccugcaggcuggcug

SEQ ID NO: 27582 - RNA, 20 nt, Artificial Sequence
  HTT spacer sequence GTCN PAM
ugcaguagaaggugccguga

SEQ ID NO: 27583 - RNA, 20 nt, Artificial Sequence
  HTT spacer sequence GTCN PAM
cccugguggggugugcaugc

SEQ ID NO: 27584 - RNA, 20 nt, Artificial Sequence
  HTT spacer sequence GTCN PAM
ggaugcacagaugccauggc

SEQ ID NO: 27585 - RNA, 20 nt, Artificial Sequence
  HTT spacer sequence GTCN PAM
agcacccccagccacuggcc

SEQ ID NO: 27586 - RNA, 20 nt, Artificial Sequence
  HTT spacer sequence GTCN PAM
caugcagcacaggccuugcg

SEQ ID NO: 27587 - RNA, 20 nt, Artificial Sequence
  HTT spacer sequence GTCN PAM
ggggugguggacagggcccc

SEQ ID NO: 27588 - RNA, 20 nt, Artificial Sequence
  HTT spacer sequence GTCN PAM
accaccccggacgcugucgc

SEQ ID NO: 27589 - RNA, 20 nt, Artificial Sequence
  HTT spacer sequence GTCN PAM
gcgggugcucaggagggcua

SEQ ID NO: 27590 - RNA, 20 nt, Artificial Sequence
  HTT spacer sequence GTCN PAM
ccuugugaaugcauaaacag

SEQ ID NO: 27591 - RNA, 20 nt, Artificial Sequence
  HTT spacer sequence GTCN PAM
ugcuguggccaccugcccac

SEQ ID NO: 27592 - RNA, 20 nt, Artificial Sequence
  HTT spacer sequence GTCN PAM
ucaguccugcuguggccacc

SEQ ID NO: 27593 - RNA, 20 nt, Artificial Sequence
  HTT spacer sequence GTCN PAM
gugcccgaggaggaggggcu

SEQ ID NO: 27594 - RNA, 20 nt, Artificial Sequence
  HTT spacer sequence GTCN PAM
ucugugcccgaggaggaggg

SEQ ID NO: 27595 - RNA, 20 nt, Artificial Sequence
  HTT spacer sequence GTCN PAM
uucuccacccaccagucagg

SEQ ID NO: 27596 - RNA, 20 nt, Artificial Sequence
  HTT spacer sequence GTCN PAM
gggacagcagccucccuguc

SEQ ID NO: 27597 - RNA, 20 nt, Artificial Sequence
  HTT spacer sequence GTCN PAM
cugacugguggguggagaac

SEQ ID NO: 27598 - RNA, 20 nt, Artificial Sequence
  HTT spacer sequence GTCN PAM
cucagcugagaaggccagcc

SEQ ID NO: 27599 - RNA, 20 nt, Artificial Sequence
  HTT spacer sequence GTCN PAM
agagacaugggccucccacu

SEQ ID NO: 27600 - RNA, 20 nt, Artificial Sequence
  HTT spacer sequence GTCN PAM
cuggacacaguggaggcugc

SEQ ID NO: 27601 - RNA, 20 nt, Artificial Sequence
  HTT spacer sequence GTCN PAM
gccuaggagcuggcuggcag

SEQ ID NO: 27602 - RNA, 20 nt, Artificial Sequence
  HTT spacer sequence GTCN PAM
caacaccugccagccagcuc

SEQ ID NO: 27603 - RNA, 20 nt, Artificial Sequence
  HTT spacer sequence GTCN PAM
cugagcuguguuuugucuga

SEQ ID NO: 27604 - RNA, 20 nt, Artificial Sequence
  HTT spacer sequence GTCN PAM
gagccucucucggucaacag

SEQ ID NO: 27605 - RNA, 20 nt, Artificial Sequence
  HTT spacer sequence GTCN PAM
acagcaaagcuuggugucuu

SEQ ID NO: 27606 - RNA, 20 nt, Artificial Sequence
  HTT spacer sequence GTCN PAM
uggcacuguuagugacagag

SEQ ID NO: 27607 - RNA, 20 nt, Artificial Sequence
  HTT spacer sequence GTCN PAM
cuaacagugccaagacacca

SEQ ID NO: 27608 - RNA, 20 nt, Artificial Sequence
  HTT spacer sequence GTCN PAM
gcuggaacgggggcagaagg

SEQ ID NO: 27609 - RNA, 20 nt, Artificial Sequence
  HTT spacer sequence GTCN PAM
ccgugcaagaugucagcugg

SEQ ID NO: 27610 - RNA, 20 nt, Artificial Sequence
  HTT spacer sequence GTCN PAM
ggagagugcagaucugugcu

SEQ ID NO: 27611 - RNA, 20 nt, Artificial Sequence
  HTT spacer sequence GTCN PAM
ccgaugagcacagaucugca

SEQ ID NO: 27612 - RNA, 20 nt, Artificial Sequence
  HTT spacer sequence GTCN PAM
gagccgccacuccuaucccc

SEQ ID NO: 27613 - RNA, 20 nt, Artificial Sequence
  HTT spacer sequence GTCN PAM
cuggaccagccuccuguuug

SEQ ID NO: 27614 - RNA, 20 nt, Artificial Sequence
  HTT spacer sequence GTCN PAM
agggaccuggccuggggaua

SEQ ID NO: 27615 - RNA, 20 nt, Artificial Sequence
  HTT spacer sequence GTCN PAM
uuaaaauggaaguggauucu

SEQ ID NO: 27616 - RNA, 20 nt, Artificial Sequence
  HTT spacer sequence GTCN PAM
gcaagcagagcucccaaauc

SEQ ID NO: 27617 - RNA, 20 nt, Artificial Sequence
  HTT spacer sequence GTCN PAM
cacagccagucggcaagcag

SEQ ID NO: 27618 - RNA, 20 nt, Artificial Sequence
  HTT spacer sequence GTCN PAM
ccaaccuugccuggcucgcc

SEQ ID NO: 27619 - RNA, 20 nt, Artificial Sequence
  HTT spacer sequence GTCN PAM
uguggcuugguuuggucaug

SEQ ID NO: 27620 - RNA, 20 nt, Artificial Sequence
  HTT spacer sequence GTCN PAM
ugcccgucgauguuuugggu

SEQ ID NO: 27621 - RNA, 20 nt, Artificial Sequence
  HTT spacer sequence GTCN PAM
auguuuuggguauugaaugu

SEQ ID NO: 27622 - RNA, 20 nt, Artificial Sequence
  HTT spacer sequence GTCN PAM
caaggcagcaccugcacaga

SEQ ID NO: 27623 - RNA, 20 nt, Artificial Sequence
  HTT spacer sequence GTCN PAM
cucuccuauguggcagcugg

SEQ ID NO: 27624 - RNA, 20 nt, Artificial Sequence
  HTT spacer sequence GTCN PAM
acaucucagcugcuccccag

SEQ ID NO: 27625 - RNA, 20 nt, Artificial Sequence
  HTT spacer sequence GTCN PAM
uggcugggggaggccucugu

SEQ ID NO: 27626 - RNA, 20 nt, Artificial Sequence
  HTT spacer sequence GTCN PAM
ucguggcggggcagcaggag

SEQ ID NO: 27627 - RNA, 20 nt, Artificial Sequence
  HTT spacer sequence GTCN PAM
gauguuugaggaggcccuua

SEQ ID NO: 27628 - RNA, 20 nt, Artificial Sequence
  HTT spacer sequence GTCN PAM
gcagcucugagacagcagua

SEQ ID NO: 27629 - RNA, 20 nt, Artificial Sequence
  HTT spacer sequence GTCN PAM
cagagcugcugacauaaccu

SEQ ID NO: 27630 - RNA, 20 nt, Artificial Sequence
  HTT spacer sequence GTCN PAM
uccucuuguuuacgacguga

SEQ ID NO: 27631 - RNA, 20 nt, Artificial Sequence
  HTT spacer sequence GTCN PAM
uaaacaagaggaagacaaac

SEQ ID NO: 27632 - RNA, 20 nt, Artificial Sequence
  HTT spacer sequence GTCN PAM
uuagcaaggggcucagaaca

SEQ ID NO: 27633 - RNA, 20 nt, Artificial Sequence
  HTT spacer sequence GTCN PAM
cccacccccaaagaccugcc

SEQ ID NO: 27634 - RNA, 20 nt, Artificial Sequence
  HTT spacer sequence GTCN PAM
uugggggugggggacaccua

SEQ ID NO: 27635 - RNA, 20 nt, Artificial Sequence
  HTT spacer sequence GTCN PAM
uuuuuacuaaugagcucaua

SEQ ID NO: 27636 - RNA, 20 nt, Artificial Sequence
  HTT spacer sequence GTCN PAM
auaugcacaugcauggauac

SEQ ID NO: 27637 - RNA, 20 nt, Artificial Sequence
  HTT spacer sequence GTCN PAM
ugagagguguguguguaaaa

SEQ ID NO: 27638 - RNA, 20 nt, Artificial Sequence
  HTT spacer sequence GTCN PAM
guucuuccuggaaguugacu

SEQ ID NO: 27639 - RNA, 20 nt, Artificial Sequence
  HTT spacer sequence GTCN PAM
acuuccaggaagaaccgaca

SEQ ID NO: 27640 - RNA, 20 nt, Artificial Sequence
  HTT spacer sequence GTCN PAM
aaggaaagucaacuuccagg

SEQ ID NO: 27641 - RNA, 20 nt, Artificial Sequence
  HTT spacer sequence GTCN PAM
aguuagccgcgugacggaca

SEQ ID NO: 27642 - RNA, 20 nt, Artificial Sequence
  HTT spacer sequence GTCN PAM
cgcggcuaacuugaccuggc

SEQ ID NO: 27643 - RNA, 20 nt, Artificial Sequence
  HTT spacer sequence GTCN PAM
gucacgcggcuaacuugacc

SEQ ID NO: 27644 - RNA, 20 nt, Artificial Sequence
  HTT spacer sequence GTCN PAM
cacgccuggauguccgucac

SEQ ID NO: 27645 - RNA, 20 nt, Artificial Sequence
  HTT spacer sequence GTCN PAM
gggcagggcucauucauugc

SEQ ID NO: 27646 - RNA, 20 nt, Artificial Sequence
  HTT spacer sequence GTCN PAM
ccauaucagcucucugcaga

SEQ ID NO: 27647 - RNA, 20 nt, Artificial Sequence
  HTT spacer sequence GTCN PAM
uccucccuucugcagagagc

SEQ ID NO: 27648 - RNA, 20 nt, Artificial Sequence
  HTT spacer sequence GTCN PAM
aguuuugggggugggcugug

SEQ ID NO: 27649 - RNA, 20 nt, Artificial Sequence
  HTT spacer sequence GTCN PAM
auguaggugauguuuccagc

SEQ ID NO: 27650 - RNA, 20 nt, Artificial Sequence
  HTT spacer sequence GTCN PAM
acccucauuucugccagcgc

SEQ ID NO: 27651 - RNA, 20 nt, Artificial Sequence
  HTT spacer sequence GTCN PAM
uuucaaggggaaaaugugaa

SEQ ID NO: 27652 - RNA, 20 nt, Artificial Sequence
  HTT spacer sequence GTCN PAM
ggaggggguucagcuucaca

SEQ ID NO: 27653 - RNA, 20 nt, Artificial Sequence
  HTT spacer sequence GTCN PAM
uuuagggcacagggccuucu

SEQ ID NO: 27654 - RNA, 20 nt, Artificial Sequence
  HTT spacer sequence GTCN PAM
uuucagagcccucggagcca

SEQ ID NO: 27655 - RNA, 20 nt, Artificial Sequence
  HTT spacer sequence GTCN PAM
cgagcuccacguggggcuca

SEQ ID NO: 27656 - RNA, 20 nt, Artificial Sequence
  HTT spacer sequence GTCN PAM
acuauccgucccgagcucca

SEQ ID NO: 27657 - RNA, 20 nt, Artificial Sequence
  HTT spacer sequence GTCN PAM
gguggguggagucaggcuuc

SEQ ID NO: 27658 - RNA, 20 nt, Artificial Sequence
  HTT spacer sequence GTCN PAM
ggcuucucuugcuaccugug

SEQ ID NO: 27659 - RNA, 20 nt, Artificial Sequence
  HTT spacer sequence GTCN PAM
gcugggaaggaugcucacag

SEQ ID NO: 27660 - RNA, 20 nt, Artificial Sequence
  HTT spacer sequence GTCN PAM
cucccccgcuuccucccucu

SEQ ID NO: 27661 - RNA, 20 nt, Artificial Sequence
  HTT spacer sequence GTCN PAM
uccccgcagagggaggaagc

SEQ ID NO: 27662 - RNA, 20 nt, Artificial Sequence
  HTT spacer sequence GTCN PAM
cggguccuccccgcagaggg

SEQ ID NO: 27663 - RNA, 20 nt, Artificial Sequence
  HTT spacer sequence GTCN PAM
acccuggccagcagcugugg

SEQ ID NO: 27664 - RNA, 20 nt, Artificial Sequence
  HTT spacer sequence GTCN PAM
uccagaggggucacguguag

SEQ ID NO: 27665 - RNA, 20 nt, Artificial Sequence
  HTT spacer sequence GTCN PAM
cguguaggagugagaagaag

SEQ ID NO: 27666 - RNA, 20 nt, Artificial Sequence
  HTT spacer sequence GTCN PAM
cucagcagcucucaagaucu

SEQ ID NO: 27667 - RNA, 20 nt, Artificial Sequence
  HTT spacer sequence GTCN PAM
gagccauccugagcucucca

SEQ ID NO: 27668 - RNA, 20 nt, Artificial Sequence
  HTT spacer sequence GTCN PAM
ucgucugagccauccugagc

SEQ ID NO: 27669 - RNA, 20 nt, Artificial Sequence
  HTT spacer sequence GTCN PAM
ugcggcauucugagcagcuc

SEQ ID NO: 27670 - RNA, 20 nt, Artificial Sequence
  HTT spacer sequence GTCN PAM
cgcucuggugcagucaaagg

SEQ ID NO: 27671 - RNA, 20 nt, Artificial Sequence
  HTT spacer sequence GTCN PAM
aaggaacgccuuccccucag

SEQ ID NO: 27672 - RNA, 20 nt, Artificial Sequence
  HTT spacer sequence GTCN PAM
cccgcugcaaucuggguggu

SEQ ID NO: 27673 - RNA, 20 nt, Artificial Sequence
  HTT spacer sequence GTCN PAM
acguuggccacgauccucca

SEQ ID NO: 27674 - RNA, 20 nt, Artificial Sequence
  HTT spacer sequence GTCN PAM
gagcccacccuccguaggca

SEQ ID NO: 27675 - RNA, 20 nt, Artificial Sequence
  HTT spacer sequence GTCN PAM
aggucucacugcuuugcacc

SEQ ID NO: 27676 - RNA, 20 nt, Artificial Sequence
  HTT spacer sequence GTCN PAM
cacugcuuugcaccgugguc

SEQ ID NO: 27677 - RNA, 20 nt, Artificial Sequence
  HTT spacer sequence GTCN PAM
gagggacugucagcugagcu

SEQ ID NO: 27678 - RNA, 20 nt, Artificial Sequence
  HTT spacer sequence GTCN PAM
cucugaccacggugcaaagc

SEQ ID NO: 27679 - RNA, 20 nt, Artificial Sequence
  HTT spacer sequence GTCN PAM
gcugagcuugagcuccccug

SEQ ID NO: 27680 - RNA, 20 nt, Artificial Sequence
  HTT spacer sequence GTCN PAM
cggagccccacccagaccug

SEQ ID NO: 27681 - RNA, 20 nt, Artificial Sequence
  HTT spacer sequence GTCN PAM
ggguggggcuccgggacucg

SEQ ID NO: 27682 - RNA, 20 nt, Artificial Sequence
  HTT spacer sequence GTCN PAM
uucccuuugcucucagaagc

SEQ ID NO: 27683 - RNA, 20 nt, Artificial Sequence
  HTT spacer sequence GTCN PAM
guccuucccuuugcucucag

SEQ ID NO: 27684 - RNA, 20 nt, Artificial Sequence
  HTT spacer sequence GTCN PAM
agguucucaugaagcaaagc

SEQ ID NO: 27685 - RNA, 20 nt, Artificial Sequence
  HTT spacer sequence GTCN PAM
uaggaagcagucuccuaagu

SEQ ID NO: 27686 - RNA, 20 nt, Artificial Sequence
  HTT spacer sequence GTCN PAM
ccuaagugcuucuccagcag

SEQ ID NO: 27687 - RNA, 20 nt, Artificial Sequence
  HTT spacer sequence GTCN PAM
caccagcuaacaucuggcau

SEQ ID NO: 27688 - RNA, 20 nt, Artificial Sequence
  HTT spacer sequence GTCN PAM
cccaggcagcugccagcagg

SEQ ID NO: 27689 - RNA, 20 nt, Artificial Sequence
  HTT spacer sequence GTCN PAM
cugcuggcagcugccugggg

SEQ ID NO: 27690 - RNA, 20 nt, Artificial Sequence
  HTT spacer sequence GTCN PAM
uccugcccugcagaugggag

SEQ ID NO: 27691 - RNA, 20 nt, Artificial Sequence
  HTT spacer sequence GTCN PAM
agugacaucauaagcuuaua

SEQ ID NO: 27692 - RNA, 20 nt, Artificial Sequence
  HTT spacer sequence GTCN PAM
cuugaccaugaaggcuccag

SEQ ID NO: 27693 - RNA, 20 nt, Artificial Sequence
  HTT spacer sequence GTCN PAM
uauaagcuuaugaugucacu

SEQ ID NO: 27694 - RNA, 20 nt, Artificial Sequence
  HTT spacer sequence GTCN PAM
ugaggcuuguguaugucaua

SEQ ID NO: 27695 - RNA, 20 nt, Artificial Sequence
  HTT spacer sequence GTCN PAM
ucaggcccagcacagagacu

SEQ ID NO: 27696 - RNA, 20 nt, Artificial Sequence
  HTT spacer sequence GTCN PAM
cugugcugggccugaugacc

SEQ ID NO: 27697 - RNA, 20 nt, Artificial Sequence
  HTT spacer sequence GTCN PAM
auggccaaggagguggaagg

SEQ ID NO: 27698 - RNA, 20 nt, Artificial Sequence
  HTT spacer sequence GTCN PAM
cuggcccagcugcucccagg

SEQ ID NO: 27699 - RNA, 20 nt, Artificial Sequence
  HTT spacer sequence GTCN PAM
gcagggccugccccgucuau

SEQ ID NO: 27700 - RNA, 20 nt, Artificial Sequence
  HTT spacer sequence GTCN PAM
auucuagcuuguuuguccug

SEQ ID NO: 27701 - RNA, 20 nt, Artificial Sequence
  HTT spacer sequence GTCN PAM
ugucugaaccagcgccuacu

SEQ ID NO: 27702 - RNA, 20 nt, Artificial Sequence
  HTT spacer sequence GTCN PAM
gaaccagcgccuacuccaag

SEQ ID NO: 27703 - RNA, 20 nt, Artificial Sequence
  HTT spacer sequence GTCN PAM
ggagcuuagaagcauccccg

SEQ ID NO: 27704 - RNA, 20 nt, Artificial Sequence
  HTT spacer sequence GTCN PAM
ucuugggaugcagaugucuu

SEQ ID NO: 27705 - RNA, 20 nt, Artificial Sequence
  HTT spacer sequence GTCN PAM
uaccaaccugcaagaacaaa

SEQ ID NO: 27706 - RNA, 20 nt, Artificial Sequence
  HTT spacer sequence GTCN PAM
auguuugcugaggucccguc

SEQ ID NO: 27707 - RNA, 20 nt, Artificial Sequence
  HTT spacer sequence GTCN PAM
cgucugguucuggcuaauug

SEQ ID NO: 27708 - RNA, 20 nt, Artificial Sequence
  HTT spacer sequence GTCN PAM
gguucuggcuaauuggcagg

SEQ ID NO: 27709 - RNA, 20 nt, Artificial Sequence
  HTT spacer sequence GTCN PAM
uccacccauucuuucccugc

SEQ ID NO: 27710 - RNA, 20 nt, Artificial Sequence
  HTT spacer sequence GTCN PAM
acccauucuuucccugcucu

SEQ ID NO: 27711 - RNA, 20 nt, Artificial Sequence
  HTT spacer sequence GTCN PAM
gugccaggagagacgggggc

SEQ ID NO: 27712 - RNA, 20 nt, Artificial Sequence
  HTT spacer sequence GTCN PAM
cuccuggcacagacagcaga

SEQ ID NO: 27713 - RNA, 20 nt, Artificial Sequence
  HTT spacer sequence GTCN PAM
gccaaggggccagcuccugc

SEQ ID NO: 27714 - RNA, 20 nt, Artificial Sequence
  HTT spacer sequence GTCN PAM
gccggagggaugugguggac

SEQ ID NO: 27715 - RNA, 20 nt, Artificial Sequence
  HTT spacer sequence GTCN PAM
accacaucccuccggcagac

SEQ ID NO: 27716 - RNA, 20 nt, Artificial Sequence
  HTT spacer sequence GTCN PAM
ccucauaggugacaccgcuc

SEQ ID NO: 27717 - RNA, 20 nt, Artificial Sequence
  HTT spacer sequence GTCN PAM
ccuaugaggagacagauuua

SEQ ID NO: 27718 - RNA, 20 nt, Artificial Sequence
  HTT spacer sequence GTCN PAM
cuucagagaaauggagcacc

SEQ ID NO: 27719 - RNA, 20 nt, Artificial Sequence
  HTT spacer sequence GTCN PAM
agguguggacagccuggcac

SEQ ID NO: 27720 - RNA, 20 nt, Artificial Sequence
  HTT spacer sequence GTCN PAM
acaccuggaccagggagaag

SEQ ID NO: 27721 - RNA, 20 nt, Artificial Sequence
  HTT spacer sequence GTCN PAM
agugggaagcagcggugaac

SEQ ID NO: 27722 - RNA, 20 nt, Artificial Sequence
  HTT spacer sequence GTCN PAM
cuccccaugccacggcagag

SEQ ID NO: 27723 - RNA, 20 nt, Artificial Sequence
  HTT spacer sequence GTCN PAM
ccuugccgagcugugcccug

SEQ ID NO: 27724 - RNA, 20 nt, Artificial Sequence
  HTT spacer sequence GTCN PAM
cuuccccugcguggugcgug

SEQ ID NO: 27725 - RNA, 20 nt, Artificial Sequence
  HTT spacer sequence GTCN PAM
gaugagggaaguagccaggg

SEQ ID NO: 27726 - RNA, 20 nt, Artificial Sequence
  HTT spacer sequence GTCN PAM
cuucaguggcggcuccaccc

SEQ ID NO: 27727 - RNA, 20 nt, Artificial Sequence
  HTT spacer sequence GTCN PAM
caucauguagaggcaaggcc

SEQ ID NO: 27728 - RNA, 20 nt, Artificial Sequence
  HTT spacer sequence GTCN PAM
ucgguuggcugugucacauc

SEQ ID NO: 27729 - RNA, 20 nt, Artificial Sequence
  HTT spacer sequence GTCN PAM
gguccaugagcaccgugaca

SEQ ID NO: 27730 - RNA, 20 nt, Artificial Sequence
  HTT spacer sequence GTCN PAM
augagcaccgugacaguguc

SEQ ID NO: 27731 - RNA, 20 nt, Artificial Sequence
  HTT spacer sequence GTCN PAM
cggugcucauggaccagacu

SEQ ID NO: 27732 - RNA, 20 nt, Artificial Sequence
  HTT spacer sequence GTCN PAM
guggguagagguggacccgg

SEQ ID NO: 27733 - RNA, 20 nt, Artificial Sequence
  HTT spacer sequence GTCN PAM
accucuacccacagacacug

SEQ ID NO: 27734 - RNA, 20 nt, Artificial Sequence
  HTT spacer sequence GTCN PAM
ucaccaggaccucuuuuggg

SEQ ID NO: 27735 - RNA, 20 nt, Artificial Sequence
  HTT spacer sequence GTCN PAM
uggugaugacacaaggccgg

SEQ ID NO: 27736 - RNA, 20 nt, Artificial Sequence
  HTT spacer sequence GTCN PAM
acaugguuucccaaaagagg

SEQ ID NO: 27737 - RNA, 20 nt, Artificial Sequence
  HTT spacer sequence GTCN PAM
cccaggcucugcagccccag

SEQ ID NO: 27738 - RNA, 20 nt, Artificial Sequence
  HTT spacer sequence GTCN PAM
ucuguggcucaagccacuug

SEQ ID NO: 27739 - RNA, 20 nt, Artificial Sequence
  HTT spacer sequence GTCN PAM
uguugcagccacauccucug

SEQ ID NO: 27740 - RNA, 20 nt, Artificial Sequence
  HTT spacer sequence GTCN PAM
uggucgggggugucugggcc

SEQ ID NO: 27741 - RNA, 20 nt, Artificial Sequence
  HTT spacer sequence GTCN PAM
ggggugucugggcccugggu

SEQ ID NO: 27742 - RNA, 20 nt, Artificial Sequence
  HTT spacer sequence GTCN PAM
gggcccugggugggcccugu

SEQ ID NO: 27743 - RNA, 20 nt, Artificial Sequence
  HTT spacer sequence GTCN PAM
acagggcccacccagggccc

SEQ ID NO: 27744 - RNA, 20 nt, Artificial Sequence
  HTT spacer sequence GTCN PAM
gggucagggcaucacuggag

SEQ ID NO: 27745 - RNA, 20 nt, Artificial Sequence
  HTT spacer sequence GTCN PAM
gggcaucacuggaggcagag

SEQ ID NO: 27746 - RNA, 20 nt, Artificial Sequence
  HTT spacer sequence GTCN PAM
ggguuccccuugugugcaca

SEQ ID NO: 27747 - RNA, 20 nt, Artificial Sequence
  HTT spacer sequence GTCN PAM
ggcagcuacccccaaaacug

SEQ ID NO: 27748 - RNA, 20 nt, Artificial Sequence
  HTT spacer sequence GTCN PAM
uagcaguuuuggggguagcu

SEQ ID NO: 27749 - RNA, 20 nt, Artificial Sequence
  HTT spacer sequence GTCN PAM
ugagguggauccuggccccu

SEQ ID NO: 27750 - RNA, 20 nt, Artificial Sequence
  HTT spacer sequence GTCN PAM
agaggguacaggggccagga

SEQ ID NO: 27751 - RNA, 20 nt, Artificial Sequence
  HTT spacer sequence GTCN PAM
aggcuccggagccugcccag

SEQ ID NO: 27752 - RNA, 20 nt, Artificial Sequence
  HTT spacer sequence GTCN PAM
ugggcccaaaucacgggggg

SEQ ID NO: 27753 - RNA, 20 nt, Artificial Sequence
  HTT spacer sequence GTCN PAM
cacugaggggcaccuuccag

SEQ ID NO: 27754 - RNA, 20 nt, Artificial Sequence
  HTT spacer sequence GTCN PAM
guccccauguccugcuggcc

SEQ ID NO: 27755 - RNA, 20 nt, Artificial Sequence
  HTT spacer sequence GTCN PAM
ccauguccugcuggccuguc

SEQ ID NO: 27756 - RNA, 20 nt, Artificial Sequence
  HTT spacer sequence GTCN PAM
ugcuggccugucaggcaggg

SEQ ID NO: 27757 - RNA, 20 nt, Artificial Sequence
  HTT spacer sequence GTCN PAM
ggcagggcagaaaauccacc

SEQ ID NO: 27758 - RNA, 20 nt, Artificial Sequence
  HTT spacer sequence GTCN PAM
aguugggcccagccucauua

SEQ ID NO: 27759 - RNA, 20 nt, Artificial Sequence
  HTT spacer sequence GTCN PAM
caggucugcaccagggacag

SEQ ID NO: 27760 - RNA, 20 nt, Artificial Sequence
  HTT spacer sequence GTCN PAM
gcaccagggacagcuccugc

SEQ ID NO: 27761 - RNA, 20 nt, Artificial Sequence
  HTT spacer sequence GTCN PAM
cuggugcagaccugggacau

SEQ ID NO: 27762 - RNA, 20 nt, Artificial Sequence
  HTT spacer sequence GTCN PAM
ggccucggcaggagcugucc

SEQ ID NO: 27763 - RNA, 20 nt, Artificial Sequence
  HTT spacer sequence GTCN PAM
accagcagcaccugagggag

SEQ ID NO: 27764 - RNA, 20 nt, Artificial Sequence
  HTT spacer sequence GTCN PAM
ccuagggccagaggcugguc

SEQ ID NO: 27765 - RNA, 20 nt, Artificial Sequence
  HTT spacer sequence GTCN PAM
cuacggggucuccuagggcc

SEQ ID NO: 27766 - RNA, 20 nt, Artificial Sequence
  HTT spacer sequence GTCN PAM
cagcaggccaugcagcuuug

SEQ ID NO: 27767 - RNA, 20 nt, Artificial Sequence
  HTT spacer sequence GTCN PAM
ccugcuggggaggggcucgu

SEQ ID NO: 27768 - RNA, 20 nt, Artificial Sequence
  HTT spacer sequence GTCN PAM
ccacaucuguccccugcugg

SEQ ID NO: 27769 - RNA, 20 nt, Artificial Sequence
  HTT spacer sequence GTCN PAM
ucacauuggaggucagugug

SEQ ID NO: 27770 - RNA, 20 nt, Artificial Sequence
  HTT spacer sequence GTCN PAM
gugugagggcucugccucgg

SEQ ID NO: 27771 - RNA, 20 nt, Artificial Sequence
  HTT spacer sequence GTCN PAM
agggccucccaugugcacug

SEQ ID NO: 27772 - RNA, 20 nt, Artificial Sequence
  HTT spacer sequence GTCN PAM
ggugggggcccccggcagug

SEQ ID NO: 27773 - RNA, 20 nt, Artificial Sequence
  HTT spacer sequence GTCN PAM
acuggccagcagcugccccu

SEQ ID NO: 27774 - RNA, 20 nt, Artificial Sequence
  HTT spacer sequence GTCN PAM
uggcugaaggggcagcugcu

SEQ ID NO: 27775 - RNA, 20 nt, Artificial Sequence
  HTT spacer sequence GTCN PAM
ggccuacuguccuggcugaa

SEQ ID NO: 27776 - RNA, 20 nt, Artificial Sequence
  HTT spacer sequence GTCN PAM
ccagcagcuccaagguggau

SEQ ID NO: 27777 - RNA, 20 nt, Artificial Sequence
  HTT spacer sequence GTCN PAM
uggggccucuacgugcccuc

SEQ ID NO: 27778 - RNA, 20 nt, Artificial Sequence
  HTT spacer sequence GTCN PAM
gauccuguuaccccuguugu

SEQ ID NO: 27779 - RNA, 20 nt, Artificial Sequence
  HTT spacer sequence GTCN PAM
uccccacuaaccuguuuccu

SEQ ID NO: 27780 - RNA, 20 nt, Artificial Sequence
  HTT spacer sequence GTCN PAM
uguccuccccacuaaccugu

SEQ ID NO: 27781 - RNA, 20 nt, Artificial Sequence
  HTT spacer sequence GTCN PAM
augcugagucgcuagagcug

SEQ ID NO: 27782 - RNA, 20 nt, Artificial Sequence
  HTT spacer sequence GTCN PAM
cuagagcugcacccagaacc

SEQ ID NO: 27783 - RNA, 20 nt, Artificial Sequence
  HTT spacer sequence GTCN PAM
cagcagugguucugggugca

SEQ ID NO: 27784 - RNA, 20 nt, Artificial Sequence
  HTT spacer sequence GTCN PAM
uggcuacggaaagggcauuc

SEQ ID NO: 27785 - RNA, 20 nt, Artificial Sequence
  HTT spacer sequence GTCN PAM
gaaugcccuuuccguagcca

SEQ ID NO: 27786 - RNA, 20 nt, Artificial Sequence
  HTT spacer sequence GTCN PAM
cugaccucaccggggagggc

SEQ ID NO: 27787 - RNA, 20 nt, Artificial Sequence
  HTT spacer sequence GTCN PAM
gggaccgguccgaaugcccu

SEQ ID NO: 27788 - RNA, 20 nt, Artificial Sequence
  HTT spacer sequence GTCN PAM
cuccuucaucugcaggcacu

SEQ ID NO: 27789 - RNA, 20 nt, Artificial Sequence
  HTT spacer sequence GTCN PAM
gcccuccgugcugggggcug

SEQ ID NO: 27790 - RNA, 20 nt, Artificial Sequence
  HTT spacer sequence GTCN PAM
aguggagaugccccagugcc

SEQ ID NO: 27791 - RNA, 20 nt, Artificial Sequence
  HTT spacer sequence GTCN PAM
ccugaggcccagauggaagg

SEQ ID NO: 27792 - RNA, 20 nt, Artificial Sequence
  HTT spacer sequence GTCN PAM
cuuccaucugggccucagga

SEQ ID NO: 27793 - RNA, 20 nt, Artificial Sequence
  HTT spacer sequence GTCN PAM
agucccuuccaucugggccu

SEQ ID NO: 27794 - RNA, 20 nt, Artificial Sequence
  HTT spacer sequence GTCN PAM
cauggggcugaugguggggc

SEQ ID NO: 27795 - RNA, 20 nt, Artificial Sequence
  HTT spacer sequence GTCN PAM
aggccuggccccaccaucag

SEQ ID NO: 27796 - RNA, 20 nt, Artificial Sequence
  HTT spacer sequence GTCN PAM
cuggucaaggccuggcccca

SEQ ID NO: 27797 - RNA, 20 nt, Artificial Sequence
  HTT spacer sequence GTCN PAM
cugcacccccuacacugggu

SEQ ID NO: 27798 - RNA, 20 nt, Artificial Sequence
  HTT spacer sequence GTCN PAM
ggauaggaaguguaugggga

SEQ ID NO: 27799 - RNA, 20 nt, Artificial Sequence
  HTT spacer sequence GTCN PAM
uuccccugagagccucgguc

SEQ ID NO: 27800 - RNA, 20 nt, Artificial Sequence
  HTT spacer sequence GTCN PAM
caccuccaaggugccucaga

SEQ ID NO: 27801 - RNA, 20 nt, Artificial Sequence
  HTT spacer sequence GTCN PAM
ucugaggcaccuuggaggug

SEQ ID NO: 27802 - RNA, 20 nt, Artificial Sequence
  HTT spacer sequence GTCN PAM
ccugcaguuggucaggccug

SEQ ID NO: 27803 - RNA, 20 nt, Artificial Sequence
  HTT spacer sequence GTCN PAM
ggccugaggagggcaggggg

SEQ ID NO: 27804 - RNA, 20 nt, Artificial Sequence
  HTT spacer sequence GTCN PAM
cucugcugaccacaguggca

SEQ ID NO: 27805 - RNA, 20 nt, Artificial Sequence
  HTT spacer sequence GTCN PAM
gcagagggacagcaggcacc

SEQ ID NO: 27806 - RNA, 20 nt, Artificial Sequence
  HTT spacer sequence GTCN PAM
augcugcacaggugccgugg

SEQ ID NO: 27807 - RNA, 20 nt, Artificial Sequence
  HTT spacer sequence GTCN PAM
ggcagggcucuguggagccc

SEQ ID NO: 27808 - RNA, 20 nt, Artificial Sequence
  HTT spacer sequence GTCN PAM
uccggccagccugggggcau

SEQ ID NO: 27809 - RNA, 20 nt, Artificial Sequence
  HTT spacer sequence GTCN PAM
cucagccccacaggggccug

SEQ ID NO: 27810 - RNA, 20 nt, Artificial Sequence
  HTT spacer sequence GTCN PAM
ccgcacgcugugccgaaucu

SEQ ID NO: 27811 - RNA, 20 nt, Artificial Sequence
  HTT spacer sequence GTCN PAM
ggguacgcagggagcugaug

SEQ ID NO: 27812 - RNA, 20 nt, Artificial Sequence
  HTT spacer sequence GTCN PAM
caaacagagcucaccuuugc

SEQ ID NO: 27813 - RNA, 20 nt, Artificial Sequence
  HTT spacer sequence GTCN PAM
ucaccggccggugccagagg

SEQ ID NO: 27814 - RNA, 20 nt, Artificial Sequence
  HTT spacer sequence GTCN PAM
guguacccugugucugcacc

SEQ ID NO: 27815 - RNA, 20 nt, Artificial Sequence
  HTT spacer sequence GTCN PAM
gcaccucugggcagggccug

SEQ ID NO: 27816 - RNA, 20 nt, Artificial Sequence
  HTT spacer sequence GTCN PAM
gagccaggcccugcccagag

SEQ ID NO: 27817 - RNA, 20 nt, Artificial Sequence
  HTT spacer sequence GTCN PAM
acagaccuaaggcccagggc

SEQ ID NO: 27818 - RNA, 20 nt, Artificial Sequence
  HTT spacer sequence GTCN PAM
guggacacuggaagcccggg

SEQ ID NO: 27819 - RNA, 20 nt, Artificial Sequence
  HTT spacer sequence GTCN PAM
uggggcugggcccucacaag

SEQ ID NO: 27820 - RNA, 20 nt, Artificial Sequence
  HTT spacer sequence GTCN PAM
ugggguccuggggcugggcc

SEQ ID NO: 27821 - RNA, 20 nt, Artificial Sequence
  HTT spacer sequence GTCN PAM
ugguccugggguccuggggc

SEQ ID NO: 27822 - RNA, 20 nt, Artificial Sequence
  HTT spacer sequence GTCN PAM
cacagcccaggacccccacc

SEQ ID NO: 27823 - RNA, 20 nt, Artificial Sequence
  HTT spacer sequence GTCN PAM
ugggcugugggacccuuaag

SEQ ID NO: 27824 - RNA, 20 nt, Artificial Sequence
  HTT spacer sequence GTCN PAM
cccaacgcuggccacuggcc

SEQ ID NO: 27825 - RNA, 20 nt, Artificial Sequence
  HTT spacer sequence GTCN PAM
cucguccucucuguuucucc

SEQ ID NO: 27826 - RNA, 20 nt, Artificial Sequence
  HTT spacer sequence GTCN PAM
ucucuguuucucccaccuuu

SEQ ID NO: 27827 - RNA, 20 nt, Artificial Sequence
  HTT spacer sequence GTCN PAM
gugcagcccugauuccugug

SEQ ID NO: 27828 - RNA, 20 nt, Artificial Sequence
  HTT spacer sequence GTCN PAM
cguuuccauagcaacagagc

SEQ ID NO: 27829 - RNA, 20 nt, Artificial Sequence
  HTT spacer sequence GTCN PAM
uuuugaugucacguuuccau

SEQ ID NO: 27830 - RNA, 20 nt, Artificial Sequence
  HTT spacer sequence GTCN PAM
gauguaggccccauuuugag

SEQ ID NO: 27831 - RNA, 20 nt, Artificial Sequence
  HTT spacer sequence GTCN PAM
ccccaggcggagaagcaccg

SEQ ID NO: 27832 - RNA, 20 nt, Artificial Sequence
  HTT spacer sequence GTCN PAM
aguugcgggcccgccggugc

SEQ ID NO: 27833 - RNA, 20 nt, Artificial Sequence
  HTT spacer sequence GTCN PAM
guccaguugcgggcccgccg

SEQ ID NO: 27834 - RNA, 20 nt, Artificial Sequence
  HTT spacer sequence GTCN PAM
gggaggaguucuucgacgag

SEQ ID NO: 27835 - RNA, 20 nt, Artificial Sequence
  HTT spacer sequence GTCN PAM
aagaacuccucccagaccag

SEQ ID NO: 27836 - RNA, 20 nt, Artificial Sequence
  HTT spacer sequence GTCN PAM
gcuugagcucgucgaagaac

SEQ ID NO: 27837 - RNA, 20 nt, Artificial Sequence
  HTT spacer sequence GTCN PAM
ucucgaagagcuugcuggcc

SEQ ID NO: 27838 - RNA, 20 nt, Artificial Sequence
  HTT spacer sequence GTCN PAM
uguuggugaucuugaucuug

SEQ ID NO: 27839 - RNA, 20 nt, Artificial Sequence
  HTT spacer sequence GTCN PAM
ugguggggcccacacugccc

SEQ ID NO: 27840 - RNA, 20 nt, Artificial Sequence
  HTT spacer sequence GTCN PAM
ggagcggcccgccacgcccg

SEQ ID NO: 27841 - RNA, 20 nt, Artificial Sequence
  HTT spacer sequence GTCN PAM
ggacgaugugugggucgugg

SEQ ID NO: 27842 - RNA, 20 nt, Artificial Sequence
  HTT spacer sequence GTCN PAM
cgacucagagcuccaagaaa

SEQ ID NO: 27843 - RNA, 20 nt, Artificial Sequence
  HTT spacer sequence GTCN PAM
uggccugccugucggucucc

SEQ ID NO: 27844 - RNA, 20 nt, Artificial Sequence
  HTT spacer sequence GTCN PAM
gucuccucuggccggguaug

SEQ ID NO: 27845 - RNA, 20 nt, Artificial Sequence
  HTT spacer sequence GTCN PAM
ccucuggccggguaugggca

SEQ ID NO: 27846 - RNA, 20 nt, Artificial Sequence
  HTT spacer sequence GTCN PAM
caccccgugggguucugccc

SEQ ID NO: 27847 - RNA, 20 nt, Artificial Sequence
  HTT spacer sequence GTCN PAM
aagagcugagggguagcagg

SEQ ID NO: 27848 - RNA, 20 nt, Artificial Sequence
  HTT spacer sequence GTCN PAM
ugggagccauccuggccucu

SEQ ID NO: 27849 - RNA, 20 nt, Artificial Sequence
  HTT spacer sequence GTCN PAM
gggcacugucccucggaggc

SEQ ID NO: 27850 - RNA, 20 nt, Artificial Sequence
  HTT spacer sequence GTCN PAM
cucggaggcagcaacacuca

SEQ ID NO: 27851 - RNA, 20 nt, Artificial Sequence
  HTT spacer sequence GTCN PAM
gugggcaccaccaugagugu

SEQ ID NO: 27852 - RNA, 20 nt, Artificial Sequence
  HTT spacer sequence GTCN PAM
uuggggaaauugagacugca

SEQ ID NO: 27853 - RNA, 20 nt, Artificial Sequence
  HTT spacer sequence GTCN PAM
caauuuccccaaugacgcag

SEQ ID NO: 27854 - RNA, 20 nt, Artificial Sequence
  HTT spacer sequence GTCN PAM
cagagcacugagccuccuuc

SEQ ID NO: 27855 - RNA, 20 nt, Artificial Sequence
  HTT spacer sequence GTCN PAM
cggugggguauuuccagaaa

SEQ ID NO: 27856 - RNA, 20 nt, Artificial Sequence
  HTT spacer sequence GTCN PAM
ugcaccucaccuggugauuu

SEQ ID NO: 27857 - RNA, 20 nt, Artificial Sequence
  HTT spacer sequence GTCN PAM
ugggccagggcaggccucca

SEQ ID NO: 27858 - RNA, 20 nt, Artificial Sequence
  HTT spacer sequence GTCN PAM
ccuccggccuucccugcagg

SEQ ID NO: 27859 - RNA, 20 nt, Artificial Sequence
  HTT spacer sequence GTCN PAM
aggaggggacaggugugguc

SEQ ID NO: 27860 - RNA, 20 nt, Artificial Sequence
  HTT spacer sequence GTCN PAM
ccuccuagacgccaacaucu

SEQ ID NO: 27861 - RNA, 20 nt, Artificial Sequence
  HTT spacer sequence GTCN PAM
cacacacccagcaucuuaaa

SEQ ID NO: 27862 - RNA, 20 nt, Artificial Sequence
  HTT spacer sequence GTCN PAM
ccagcccauuaggacagggu

SEQ ID NO: 27863 - RNA, 20 nt, Artificial Sequence
  HTT spacer sequence GTCN PAM
uaaugggcuggggacccacg

SEQ ID NO: 27864 - RNA, 20 nt, Artificial Sequence
  HTT spacer sequence GTCN PAM
cgggugggcaggggucaugg

SEQ ID NO: 27865 - RNA, 20 nt, Artificial Sequence
  HTT spacer sequence GTCN PAM
ugguggggugaaggucucag

SEQ ID NO: 27866 - RNA, 20 nt, Artificial Sequence
  HTT spacer sequence GTCN PAM
caggcacaggcaaggucaca

SEQ ID NO: 27867 - RNA, 20 nt, Artificial Sequence
  HTT spacer sequence GTCN PAM
caggugcggugagggucuug

SEQ ID NO: 27868 - RNA, 20 nt, Artificial Sequence
  HTT spacer sequence GTCN PAM
ugcagggugugaaggucaua

SEQ ID NO: 27869 - RNA, 20 nt, Artificial Sequence
  HTT spacer sequence GTCN PAM
uaggugugcggugaagguca

SEQ ID NO: 27870 - RNA, 20 nt, Artificial Sequence
  HTT spacer sequence GTCN PAM
cagguguggggugaugguuu

SEQ ID NO: 27871 - RNA, 20 nt, Artificial Sequence
  HTT spacer sequence GTCN PAM
ugcacggagcgaggguggca

SEQ ID NO: 27872 - RNA, 20 nt, Artificial Sequence
  HTT spacer sequence GTCN PAM
aggccgcccacagggccggg

SEQ ID NO: 27873 - RNA, 20 nt, Artificial Sequence
  HTT spacer sequence GTCN PAM
gcuuccaggaugggaguggc

SEQ ID NO: 27874 - RNA, 20 nt, Artificial Sequence
  HTT spacer sequence GTCN PAM
ggcaggugagccuggggcag

SEQ ID NO: 27875 - RNA, 20 nt, Artificial Sequence
  HTT spacer sequence GTCN PAM
ccagcccuagugggaguggg

SEQ ID NO: 27876 - RNA, 20 nt, Artificial Sequence
  HTT spacer sequence GTCN PAM
ggggccuugcugggccucuu

SEQ ID NO: 27877 - RNA, 20 nt, Artificial Sequence
  HTT spacer sequence GTCN PAM
guccggggccuugcugggcc

SEQ ID NO: 27878 - RNA, 20 nt, Artificial Sequence
  HTT spacer sequence GTCN PAM
ccgcuuucaguugcguugau

SEQ ID NO: 27879 - RNA, 20 nt, Artificial Sequence
  HTT spacer sequence GTCN PAM
ggggccuggcccugcccaaa

SEQ ID NO: 27880 - RNA, 20 nt, Artificial Sequence
  HTT spacer sequence GTCN PAM
cggcuuuggggccugccuag

SEQ ID NO: 27881 - RNA, 20 nt, Artificial Sequence
  HTT spacer sequence GTCN PAM
ugcucagcacccuagguccc

SEQ ID NO: 27882 - RNA, 20 nt, Artificial Sequence
  HTT spacer sequence GTCN PAM
caagccagccgcucaaaccc

SEQ ID NO: 27883 - RNA, 20 nt, Artificial Sequence
  HTT spacer sequence GTCN PAM
accgaaccucugaagauacc

SEQ ID NO: 27884 - RNA, 20 nt, Artificial Sequence
  HTT spacer sequence GTCN PAM
ugcucaggcaccuggugagg

SEQ ID NO: 27885 - RNA, 20 nt, Artificial Sequence
  HTT spacer sequence GTCN PAM
cuuccucaccaggugccuga

SEQ ID NO: 27886 - RNA, 20 nt, Artificial Sequence
  HTT spacer sequence GTCN PAM
uggccaccucccacugcccu

SEQ ID NO: 27887 - RNA, 20 nt, Artificial Sequence
  HTT spacer sequence GTCN PAM
gaggggagccugcuggaaca

SEQ ID NO: 27888 - RNA, 20 nt, Artificial Sequence
  HTT spacer sequence GTCN PAM
ggccagguuauucauuauuu

SEQ ID NO: 27889 - RNA, 20 nt, Artificial Sequence
  HTT spacer sequence GTCN PAM
caggggaggguuucugucuc

SEQ ID NO: 27890 - RNA, 20 nt, Artificial Sequence
  HTT spacer sequence GTCN PAM
ccauuccuggaggcugagag

SEQ ID NO: 27891 - RNA, 20 nt, Artificial Sequence
  HTT spacer sequence GTCN PAM
ggaguggaggcccccacucu

SEQ ID NO: 27892 - RNA, 20 nt, Artificial Sequence
  HTT spacer sequence GTCN PAM
gggcuggccaagggcugcac

SEQ ID NO: 27893 - RNA, 20 nt, Artificial Sequence
  HTT spacer sequence GTCN PAM
uggcugaugaagcacuucca

SEQ ID NO: 27894 - RNA, 20 nt, Artificial Sequence
  HTT spacer sequence GTCN PAM
gccuuaguucaccgaggggg

SEQ ID NO: 27895 - RNA, 20 nt, Artificial Sequence
  HTT spacer sequence GTCN PAM
cucucaugcucugggccuca

SEQ ID NO: 27896 - RNA, 20 nt, Artificial Sequence
  HTT spacer sequence GTCN PAM
uuagcagaggaagcuguggc

SEQ ID NO: 27897 - RNA, 20 nt, Artificial Sequence
  HTT spacer sequence GTCN PAM
cccagccacagcuuccucug

SEQ ID NO: 27898 - RNA, 20 nt, Artificial Sequence
  HTT spacer sequence GTCN PAM
uuuuucuuuauacccgcagu

SEQ ID NO: 27899 - RNA, 20 nt, Artificial Sequence
  HTT spacer sequence GTCN PAM
ccccauagcagaggcuuuuc

SEQ ID NO: 27900 - RNA, 20 nt, Artificial Sequence
  HTT spacer sequence GTCN PAM
ucacagccacgugccacccu

SEQ ID NO: 27901 - RNA, 20 nt, Artificial Sequence
  HTT spacer sequence GTCN PAM
ccucucuccuacucuugcua

SEQ ID NO: 27902 - RNA, 20 nt, Artificial Sequence
  HTT spacer sequence GTCN PAM
cucaaaggcagaguggggag

SEQ ID NO: 27903 - RNA, 20 nt, Artificial Sequence
  HTT spacer sequence GTCN PAM
agugaggcagagaugccccu

SEQ ID NO: 27904 - RNA, 20 nt, Artificial Sequence
  HTT spacer sequence GTCN PAM
ggccgccauggggcccugug

SEQ ID NO: 27905 - RNA, 20 nt, Artificial Sequence
  HTT spacer sequence GTCN PAM
ccugccuugaccucccagag

SEQ ID NO: 27906 - RNA, 20 nt, Artificial Sequence
  HTT spacer sequence GTCN PAM
aggcaggagacacagggccc

SEQ ID NO: 27907 - RNA, 20 nt, Artificial Sequence
  HTT spacer sequence GTCN PAM
ccaggccuccccugggccuc

SEQ ID NO: 27908 - RNA, 20 nt, Artificial Sequence
  HTT spacer sequence GTCN PAM
ugcccugagaggcuaagucc

SEQ ID NO: 27909 - RNA, 20 nt, Artificial Sequence
  HTT spacer sequence GTCN PAM
gcaggaguaggugggugcug

SEQ ID NO: 27910 - RNA, 20 nt, Artificial Sequence
  HTT spacer sequence GTCN PAM
cagugguaaugaggcaucag

SEQ ID NO: 27911 - RNA, 20 nt, Artificial Sequence
  HTT spacer sequence GTCN PAM
gggcaggagccuagauccag

SEQ ID NO: 27912 - RNA, 20 nt, Artificial Sequence
  HTT spacer sequence GTCN PAM
uugauauaaaaauagaggcu

SEQ ID NO: 27913 - RNA, 20 nt, Artificial Sequence
  HTT spacer sequence GTCN PAM
cacagcaaaguguggagaug

SEQ ID NO: 27914 - RNA, 20 nt, Artificial Sequence
  HTT spacer sequence GTCN PAM
guaucucaucuccacacuuu

SEQ ID NO: 27915 - RNA, 20 nt, Artificial Sequence
  HTT spacer sequence GTCN PAM
acagcccugagucaguaucu

SEQ ID NO: 27916 - RNA, 20 nt, Artificial Sequence
  HTT spacer sequence GTCN PAM
cucccugaggcauucucucc

SEQ ID NO: 27917 - RNA, 20 nt, Artificial Sequence
  HTT spacer sequence GTCN PAM
agaaacuauagaaaagcaag

SEQ ID NO: 27918 - RNA, 20 nt, Artificial Sequence
  HTT spacer sequence GTCN PAM
uauugcuuuucccuugcuuu

SEQ ID NO: 27919 - RNA, 20 nt, Artificial Sequence
  HTT spacer sequence GTCN PAM
cagcaugcacagauaaccuu

SEQ ID NO: 27920 - RNA, 20 nt, Artificial Sequence
  HTT spacer sequence GTCN PAM
caguauuacuaagguuaucu

SEQ ID NO: 27921 - RNA, 20 nt, Artificial Sequence
  HTT spacer sequence GTCN PAM
ugaagcccagcuucuuucua

SEQ ID NO: 27922 - RNA, 20 nt, Artificial Sequence
  HTT spacer sequence GTCN PAM
auugucaucuugacccugga

SEQ ID NO: 27923 - RNA, 20 nt, Artificial Sequence
  HTT spacer sequence GTCN PAM
ucuugacccuggagccuggc

SEQ ID NO: 27924 - RNA, 20 nt, Artificial Sequence
  HTT spacer sequence GTCN PAM
agaugacaauggacuuagaa

SEQ ID NO: 27925 - RNA, 20 nt, Artificial Sequence
  HTT spacer sequence GTCN PAM
ugcccagccucagcagaggg

SEQ ID NO: 27926 - RNA, 20 nt, Artificial Sequence
  HTT spacer sequence GTCN PAM
cucguuucaggaaauuaaaa

SEQ ID NO: 27927 - RNA, 20 nt, Artificial Sequence
  HTT spacer sequence GTCN PAM
ugcauuuuaauuuccugaaa

SEQ ID NO: 27928 - RNA, 20 nt, Artificial Sequence
  HTT spacer sequence GTCN PAM
gccccgcccgacuggcccua

SEQ ID NO: 27929 - RNA, 20 nt, Artificial Sequence
  HTT spacer sequence GTCN PAM
ggcggggcggacucgcuauc

SEQ ID NO: 27930 - RNA, 20 nt, Artificial Sequence
  HTT spacer sequence GTCN PAM
ccgaguccugugauggcaaa

SEQ ID NO: 27931 - RNA, 20 nt, Artificial Sequence
  HTT spacer sequence GTCN PAM
ugugauggcaaacugccgga

SEQ ID NO: 27932 - RNA, 20 nt, Artificial Sequence
  HTT spacer sequence GTCN PAM
ggcaguuugccaucacagga

SEQ ID NO: 27933 - RNA, 20 nt, Artificial Sequence
  HTT spacer sequence GTCN PAM
cagaccgaggcgucccuguc

SEQ ID NO: 27934 - RNA, 20 nt, Artificial Sequence
  HTT spacer sequence GTCN PAM
gggacguggagggccccggc

SEQ ID NO: 27935 - RNA, 20 nt, Artificial Sequence
  HTT spacer sequence GTCN PAM
cugucgccgcccgcuaaguc

SEQ ID NO: 27936 - RNA, 20 nt, Artificial Sequence
  HTT spacer sequence GTCN PAM
ccgcccgcuaaguccacccc

SEQ ID NO: 27937 - RNA, 20 nt, Artificial Sequence
  HTT spacer sequence GTCN PAM
accccucuguacuucccgua

SEQ ID NO: 27938 - RNA, 20 nt, Artificial Sequence
  HTT spacer sequence GTCN PAM
gagcgaucauccucgaagcg

SEQ ID NO: 27939 - RNA, 20 nt, Artificial Sequence
  HTT spacer sequence GTCN PAM
cuuaaguucagguagugugu

SEQ ID NO: 27940 - RNA, 20 nt, Artificial Sequence
  HTT spacer sequence GTCN PAM
gcuuguccuuccccugcccu

SEQ ID NO: 27941 - RNA, 20 nt, Artificial Sequence
  HTT spacer sequence GTCN PAM
uuccccugcccugggguauc

SEQ ID NO: 27942 - RNA, 20 nt, Artificial Sequence
  HTT spacer sequence GTCN PAM
cuuucucuaaaugguggggg

SEQ ID NO: 27943 - RNA, 20 nt, Artificial Sequence
  HTT spacer sequence GTCN PAM
cuggaggcgcugcccgcagc

SEQ ID NO: 27944 - RNA, 20 nt, Artificial Sequence
  HTT spacer sequence GTCN PAM
gaggccgccugucccuggag

SEQ ID NO: 27945 - RNA, 20 nt, Artificial Sequence
  HTT spacer sequence GTCN PAM
acaggcagaccgaguuuguc

SEQ ID NO: 27946 - RNA, 20 nt, Artificial Sequence
  HTT spacer sequence GTCN PAM
gccuguggacacuaaagccc

SEQ ID NO: 27947 - RNA, 20 nt, Artificial Sequence
  HTT spacer sequence GTCN PAM
cccagcuccaucacuuuuga

SEQ ID NO: 27948 - RNA, 20 nt, Artificial Sequence
  HTT spacer sequence GTCN PAM
aggaacuuuccgugcagcuc

SEQ ID NO: 27949 - RNA, 20 nt, Artificial Sequence
  HTT spacer sequence GTCN PAM
cccuccuauaaaaugggggu

SEQ ID NO: 27950 - RNA, 20 nt, Artificial Sequence
  HTT spacer sequence GTCN PAM
ucucuccugugaugcuccca

SEQ ID NO: 27951 - RNA, 20 nt, Artificial Sequence
  HTT spacer sequence GTCN PAM
cccuccgugugccgggcccc

SEQ ID NO: 27952 - RNA, 20 nt, Artificial Sequence
  HTT spacer sequence GTCN PAM
ggggcuuggucucccuccgu

SEQ ID NO: 27953 - RNA, 20 nt, Artificial Sequence
  HTT spacer sequence GTCN PAM
gugugggcuaagggaggcca

SEQ ID NO: 27954 - RNA, 20 nt, Artificial Sequence
  HTT spacer sequence GTCN PAM
ggcugcaccucaucacgugu

SEQ ID NO: 27955 - RNA, 20 nt, Artificial Sequence
  HTT spacer sequence GTCN PAM
ugcccacggcaacacgugau

SEQ ID NO: 27956 - RNA, 20 nt, Artificial Sequence
  HTT spacer sequence GTCN PAM
ccucugccauccaucccaca

SEQ ID NO: 27957 - RNA, 20 nt, Artificial Sequence
  HTT spacer sequence GTCN PAM
gaggugugggauggauggca

SEQ ID NO: 27958 - RNA, 20 nt, Artificial Sequence
  HTT spacer sequence GTCN PAM
cgugcuggccacgugacugu

SEQ ID NO: 27959 - RNA, 20 nt, Artificial Sequence
  HTT spacer sequence GTCN PAM
cguggccagcacgggacggg

SEQ ID NO: 27960 - RNA, 20 nt, Artificial Sequence
  HTT spacer sequence GTCN PAM
ugcaugcugccuggcucccg

SEQ ID NO: 27961 - RNA, 20 nt, Artificial Sequence
  HTT spacer sequence GTCN PAM
guccugcaugcugccuggcu

SEQ ID NO: 27962 - RNA, 20 nt, Artificial Sequence
  HTT spacer sequence GTCN PAM
ccuccucaaaagcaccuucu

SEQ ID NO: 27963 - RNA, 20 nt, Artificial Sequence
  HTT spacer sequence GTCN PAM
cagcuucuccccugcccugg

SEQ ID NO: 27964 - RNA, 20 nt, Artificial Sequence
  HTT spacer sequence GTCN PAM
ucaagucuuucugacaggag

SEQ ID NO: 27965 - RNA, 20 nt, Artificial Sequence
  HTT spacer sequence GTCN PAM
uucugacaggaggugucaga

SEQ ID NO: 27966 - RNA, 20 nt, Artificial Sequence
  HTT spacer sequence GTCN PAM
gaaagacuugaagaccaggg

SEQ ID NO: 27967 - RNA, 20 nt, Artificial Sequence
  HTT spacer sequence GTCN PAM
gaaaaguaucuuuaguagag

SEQ ID NO: 27968 - RNA, 20 nt, Artificial Sequence
  HTT spacer sequence GTCN PAM
ccgaggagggucccucucau

SEQ ID NO: 27969 - RNA, 20 nt, Artificial Sequence
  HTT spacer sequence GTCN PAM
cucucaugccgggggccgcu

SEQ ID NO: 27970 - RNA, 20 nt, Artificial Sequence
  HTT spacer sequence GTCN PAM
agcagcggcccccggcauga

SEQ ID NO: 27971 - RNA, 20 nt, Artificial Sequence
  HTT spacer sequence GTCN PAM
ucaaugagaaauccugaguc

SEQ ID NO: 27972 - RNA, 20 nt, Artificial Sequence
  HTT spacer sequence GTCN PAM
caggucuucaaugagaaauc

SEQ ID NO: 27973 - RNA, 20 nt, Artificial Sequence
  HTT spacer sequence GTCN PAM
acgggaacaacagccacaaa

SEQ ID NO: 27974 - RNA, 20 nt, Artificial Sequence
  HTT spacer sequence GTCN PAM
gagaacugggcucaguccac

SEQ ID NO: 27975 - RNA, 20 nt, Artificial Sequence
  HTT spacer sequence GTCN PAM
ugugcaaggccccaggcagc

SEQ ID NO: 27976 - RNA, 20 nt, Artificial Sequence
  HTT spacer sequence GTCN PAM
guggguuuuggcagcucccu

SEQ ID NO: 27977 - RNA, 20 nt, Artificial Sequence
  HTT spacer sequence GTCN PAM
gcugagaccacggguggccc

SEQ ID NO: 27978 - RNA, 20 nt, Artificial Sequence
  HTT spacer sequence GTCN PAM
cagcagaccucccugaaggg

SEQ ID NO: 27979 - RNA, 20 nt, Artificial Sequence
  HTT spacer sequence GTCN PAM
agcccugugggcgccuccug

SEQ ID NO: 27980 - RNA, 20 nt, Artificial Sequence
  HTT spacer sequence GTCN PAM
uggggagagagcccaggccu

SEQ ID NO: 27981 - RNA, 20 nt, Artificial Sequence
  HTT spacer sequence GTCN PAM
uucugccucucuaccaaggu

SEQ ID NO: 27982 - RNA, 20 nt, Artificial Sequence
  HTT spacer sequence GTCN PAM
cagaaggaagggccugagau

SEQ ID NO: 27983 - RNA, 20 nt, Artificial Sequence
  HTT spacer sequence GTCN PAM
uggcuucccuacaggggucc

SEQ ID NO: 27984 - RNA, 20 nt, Artificial Sequence
  HTT spacer sequence GTCN PAM
ugaguacucugcacuaccca

SEQ ID NO: 27985 - RNA, 20 nt, Artificial Sequence
  HTT spacer sequence GTCN PAM
cuccaccccuggcccccaac

SEQ ID NO: 27986 - RNA, 20 nt, Artificial Sequence
  HTT spacer sequence GTCN PAM
ggaaagggugggauguucug

SEQ ID NO: 27987 - RNA, 20 nt, Artificial Sequence
  HTT spacer sequence GTCN PAM
ugggacccuggucauugggg

SEQ ID NO: 27988 - RNA, 20 nt, Artificial Sequence
  HTT spacer sequence GTCN PAM
caggacaauccacaccccuu

SEQ ID NO: 27989 - RNA, 20 nt, Artificial Sequence
  HTT spacer sequence GTCN PAM
uuggggucauccgcuagucg

SEQ ID NO: 27990 - RNA, 20 nt, Artificial Sequence
  HTT spacer sequence GTCN PAM
uccgcuagucgcaaaggacg

SEQ ID NO: 27991 - RNA, 20 nt, Artificial Sequence
  HTT spacer sequence GTCN PAM
caaaggacggcaaugccugu

SEQ ID NO: 27992 - RNA, 20 nt, Artificial Sequence
  HTT spacer sequence GTCN PAM
uuugcgacuagcggaugacc

SEQ ID NO: 27993 - RNA, 20 nt, Artificial Sequence
  HTT spacer sequence GTCN PAM
caaaaaaaaaaaaaaagaaa

SEQ ID NO: 27994 - RNA, 20 nt, Artificial Sequence
  HTT spacer sequence GTCN PAM
cgcucuugugcagagagcag

SEQ ID NO: 27995 - RNA, 20 nt, Artificial Sequence
  HTT spacer sequence GTCN PAM
ugaacuccugaccucaggug

SEQ ID NO: 27996 - RNA, 20 nt, Artificial Sequence
  HTT spacer sequence GTCN PAM
ggaguucaagaccagccugg

SEQ ID NO: 27997 - RNA, 20 nt, Artificial Sequence
  HTT spacer sequence GTCN PAM
aaggcgguggguucuggccc

SEQ ID NO: 27998 - RNA, 20 nt, Artificial Sequence
  HTT spacer sequence GTCN PAM
cauauuccaugugcaaagga

SEQ ID NO: 27999 - RNA, 20 nt, Artificial Sequence
  HTT spacer sequence GTCN PAM
cuuacucagggucucauauu

SEQ ID NO: 28000 - RNA, 20 nt, Artificial Sequence
  HTT spacer sequence GTCN PAM
ggucacuuacucagggucuc

SEQ ID NO: 28001 - RNA, 20 nt, Artificial Sequence
  HTT spacer sequence GTCN PAM
ggaggguccggugaggcccc

SEQ ID NO: 28002 - RNA, 20 nt, Artificial Sequence
  HTT spacer sequence GTCN PAM
ggugaggccccuggugugcc

SEQ ID NO: 28003 - RNA, 20 nt, Artificial Sequence
  HTT spacer sequence GTCN PAM
acagccggcacuguccuucc

SEQ ID NO: 28004 - RNA, 20 nt, Artificial Sequence
  HTT spacer sequence GTCN PAM
uuccaggucggaggagcggc

SEQ ID NO: 28005 - RNA, 20 nt, Artificial Sequence
  HTT spacer sequence GTCN PAM
gaggagcggccggugaagaa

SEQ ID NO: 28006 - RNA, 20 nt, Artificial Sequence
  HTT spacer sequence GTCN PAM
ccuccacggcgcggcucagc

SEQ ID NO: 28007 - RNA, 20 nt, Artificial Sequence
  HTT spacer sequence GTCN PAM
agcacgcggcgcaccucgcg

SEQ ID NO: 28008 - RNA, 20 nt, Artificial Sequence
  HTT spacer sequence GTCN PAM
gcuggagaggaucaucacca

SEQ ID NO: 28009 - RNA, 20 nt, Artificial Sequence
  HTT spacer sequence GTCN PAM
agcgucuaggccagcaggcg

SEQ ID NO: 28010 - RNA, 20 nt, Artificial Sequence
  HTT spacer sequence GTCN PAM
aggccagcaggcggcggcgg

SEQ ID NO: 28011 - RNA, 20 nt, Artificial Sequence
  HTT spacer sequence GTCN PAM
ccgcucgcggggcggccccc

SEQ ID NO: 28012 - RNA, 20 nt, Artificial Sequence
  HTT spacer sequence GTCN PAM
cuucugagggguauuuugag

SEQ ID NO: 28013 - RNA, 20 nt, Artificial Sequence
  HTT spacer sequence GTCN PAM
ccagggccuggggguuccuc

SEQ ID NO: 28014 - RNA, 20 nt, Artificial Sequence
  HTT spacer sequence GTCN PAM
ccagcaugaaugcccuuccu

SEQ ID NO: 28015 - RNA, 20 nt, Artificial Sequence
  HTT spacer sequence GTCN PAM
gaggaagggcauucaugcug

SEQ ID NO: 28016 - RNA, 20 nt, Artificial Sequence
  HTT spacer sequence GTCN PAM
uagagccacucuccaguguc

SEQ ID NO: 28017 - RNA, 20 nt, Artificial Sequence
  HTT spacer sequence GTCN PAM
uuacuaucaaugauacuuga

SEQ ID NO: 28018 - RNA, 20 nt, Artificial Sequence
  HTT spacer sequence GTCN PAM
aguaucauugauaguaacga

SEQ ID NO: 28019 - RNA, 20 nt, Artificial Sequence
  HTT spacer sequence GTCN PAM
ucccucaccaggaccucugc

SEQ ID NO: 28020 - RNA, 20 nt, Artificial Sequence
  HTT spacer sequence GTCN PAM
uggugagggaggacacaggg

SEQ ID NO: 28021 - RNA, 20 nt, Artificial Sequence
  HTT spacer sequence GTCN PAM
cuccuuaaauggccucugac

SEQ ID NO: 28022 - RNA, 20 nt, Artificial Sequence
  HTT spacer sequence GTCN PAM
gaggccauuuaaggagagac

SEQ ID NO: 28023 - RNA, 20 nt, Artificial Sequence
  HTT spacer sequence GTCN PAM
cugggguuuucaucaggcgu

SEQ ID NO: 28024 - RNA, 20 nt, Artificial Sequence
  HTT spacer sequence GTCN PAM
uugcuaaggaggcaguggaa

SEQ ID NO: 28025 - RNA, 20 nt, Artificial Sequence
  HTT spacer sequence GTCN PAM
uaacaccuguucacaugcac

SEQ ID NO: 28026 - RNA, 20 nt, Artificial Sequence
  HTT spacer sequence GTCN PAM
uccaccaugauaucuccagc

SEQ ID NO: 28027 - RNA, 20 nt, Artificial Sequence
  HTT spacer sequence GTCN PAM
uccccgcaugggagcauaag

SEQ ID NO: 28028 - RNA, 20 nt, Artificial Sequence
  HTT spacer sequence GTCN PAM
guagagaaaugguugcaggu

SEQ ID NO: 28029 - RNA, 20 nt, Artificial Sequence
  HTT spacer sequence GTCN PAM
ucaggccaaccccucccuuc

SEQ ID NO: 28030 - RNA, 20 nt, Artificial Sequence
  HTT spacer sequence GTCN PAM
gccuccguguccucaggcca

SEQ ID NO: 28031 - RNA, 20 nt, Artificial Sequence
  HTT spacer sequence GTCN PAM
ucugccucugggccuucgca

SEQ ID NO: 28032 - RNA, 20 nt, Artificial Sequence
  HTT spacer sequence GTCN PAM
uuuggccagugcagcucugg

SEQ ID NO: 28033 - RNA, 20 nt, Artificial Sequence
  HTT spacer sequence GTCN PAM
gacaucggugggggacagag

SEQ ID NO: 28034 - RNA, 20 nt, Artificial Sequence
  HTT spacer sequence GTCN PAM
gacccagagcugcacuggcc

SEQ ID NO: 28035 - RNA, 20 nt, Artificial Sequence
  HTT spacer sequence GTCN PAM
cccaccgaugucagacccag

SEQ ID NO: 28036 - RNA, 20 nt, Artificial Sequence
  HTT spacer sequence GTCN PAM
cggccaaggaggcucauaga

SEQ ID NO: 28037 - RNA, 20 nt, Artificial Sequence
  HTT spacer sequence GTCN PAM
gguugcccuggcugcaaagg

SEQ ID NO: 28038 - RNA, 20 nt, Artificial Sequence
  HTT spacer sequence GTCN PAM
ccuccuggaauuaggcaagu

SEQ ID NO: 28039 - RNA, 20 nt, Artificial Sequence
  HTT spacer sequence GTCN PAM
gcaggugaacagcaugguuu

SEQ ID NO: 28040 - RNA, 20 nt, Artificial Sequence
  HTT spacer sequence GTCN PAM
aaccaugcuguucaccugcu

SEQ ID NO: 28041 - RNA, 20 nt, Artificial Sequence
  HTT spacer sequence GTCN PAM
ccacggccugcucgcuuggc

SEQ ID NO: 28042 - RNA, 20 nt, Artificial Sequence
  HTT spacer sequence GTCN PAM
uccugcgacaagcagcagca

SEQ ID NO: 28043 - RNA, 20 nt, Artificial Sequence
  HTT spacer sequence GTCN PAM
caggaugacugcagcacugc

SEQ ID NO: 28044 - RNA, 20 nt, Artificial Sequence
  HTT spacer sequence GTCN PAM
ugaggucagccaggcaagag

SEQ ID NO: 28045 - RNA, 20 nt, Artificial Sequence
  HTT spacer sequence GTCN PAM
gccaggcaagagagcagcuu

SEQ ID NO: 28046 - RNA, 20 nt, Artificial Sequence
  HTT spacer sequence GTCN PAM
aagcugcucucuugccuggc

SEQ ID NO: 28047 - RNA, 20 nt, Artificial Sequence
  HTT spacer sequence GTCN PAM
cacacccaguggaguccaag

SEQ ID NO: 28048 - RNA, 20 nt, Artificial Sequence
  HTT spacer sequence GTCN PAM
acaggcuggucccacaccca

SEQ ID NO: 28049 - RNA, 20 nt, Artificial Sequence
  HTT spacer sequence GTCN PAM
uggagcucccacccuccuca

SEQ ID NO: 28050 - RNA, 20 nt, Artificial Sequence
  HTT spacer sequence GTCN PAM
ucggcacacaggcucugggg

SEQ ID NO: 28051 - RNA, 20 nt, Artificial Sequence
  HTT spacer sequence GTCN PAM
ugaggguguaaggagcggcg

SEQ ID NO: 28052 - RNA, 20 nt, Artificial Sequence
  HTT spacer sequence GTCN PAM
ucuggcagcuggaaacuggc

SEQ ID NO: 28053 - RNA, 20 nt, Artificial Sequence
  HTT spacer sequence GTCN PAM
gcggcgucaucuggcagcug

SEQ ID NO: 28054 - RNA, 20 nt, Artificial Sequence
  HTT spacer sequence GTCN PAM
uccuggggccacccuuccuu

SEQ ID NO: 28055 - RNA, 20 nt, Artificial Sequence
  HTT spacer sequence GTCN PAM
cggagcuggaaacuggcuag

SEQ ID NO: 28056 - RNA, 20 nt, Artificial Sequence
  HTT spacer sequence GTCN PAM
ugccuacgaggcgggugggu

SEQ ID NO: 28057 - RNA, 20 nt, Artificial Sequence
  HTT spacer sequence GTCN PAM
aguuggagcccaguguguuu

SEQ ID NO: 28058 - RNA, 20 nt, Artificial Sequence
  HTT spacer sequence GTCN PAM
uggcuggguucccagcaucu

SEQ ID NO: 28059 - RNA, 20 nt, Artificial Sequence
  HTT spacer sequence GTCN PAM
gcagcugggggcaggugccu

SEQ ID NO: 28060 - RNA, 20 nt, Artificial Sequence
  HTT spacer sequence GTCN PAM
caagcccucgagagggaagg

SEQ ID NO: 28061 - RNA, 20 nt, Artificial Sequence
  HTT spacer sequence GTCN PAM
agccuaaccuuccugccagg

SEQ ID NO: 28062 - RNA, 20 nt, Artificial Sequence
  HTT spacer sequence GTCN PAM
ugugggagcguccagccuaa

SEQ ID NO: 28063 - RNA, 20 nt, Artificial Sequence
  HTT spacer sequence GTCN PAM
gccaugacgcaccgguacuu

SEQ ID NO: 28064 - RNA, 20 nt, Artificial Sequence
  HTT spacer sequence GTCN PAM
uggcugacucuacagcaguu

SEQ ID NO: 28065 - RNA, 20 nt, Artificial Sequence
  HTT spacer sequence GTCN PAM
cggaugccuggcaguuacug

SEQ ID NO: 28066 - RNA, 20 nt, Artificial Sequence
  HTT spacer sequence GTCN PAM
cugcugugcuuggguuagaa

SEQ ID NO: 28067 - RNA, 20 nt, Artificial Sequence
  HTT spacer sequence GTCN PAM
guuuucuucucgcccucucu

SEQ ID NO: 28068 - RNA, 20 nt, Artificial Sequence
  HTT spacer sequence GTCN PAM
gugauucaugcccuuccauc

SEQ ID NO: 28069 - RNA, 20 nt, Artificial Sequence
  HTT spacer sequence GTCN PAM
ggcagcgccugccccuucuc

SEQ ID NO: 28070 - RNA, 20 nt, Artificial Sequence
  HTT spacer sequence GTCN PAM
gcagaacucagcuguagaau

SEQ ID NO: 28071 - RNA, 20 nt, Artificial Sequence
  HTT spacer sequence GTCN PAM
uuaacaacuuucugauuucu

SEQ ID NO: 28072 - RNA, 20 nt, Artificial Sequence
  HTT spacer sequence GTCN PAM
auuaaggagaaaaaaaauga

SEQ ID NO: 28073 - RNA, 20 nt, Artificial Sequence
  HTT spacer sequence GTCN PAM
aaacaacaugaaauacuaca

SEQ ID NO: 28074 - RNA, 20 nt, Artificial Sequence
  HTT spacer sequence GTCN PAM
ggaguucaagaccagccuga

SEQ ID NO: 28075 - RNA, 20 nt, Artificial Sequence
  HTT spacer sequence GTCN PAM
ugaacuccugaccucagagg

SEQ ID NO: 28076 - RNA, 20 nt, Artificial Sequence
  HTT spacer sequence GTCN PAM
ggcuggucuugaacuccuga

SEQ ID NO: 28077 - RNA, 20 nt, Artificial Sequence
  HTT spacer sequence GTCN PAM
uuacuaaaaauacaaaauua

SEQ ID NO: 28078 - RNA, 20 nt, Artificial Sequence
  HTT spacer sequence GTCN PAM
cccaggcuggagugcagugg

SEQ ID NO: 28079 - RNA, 20 nt, Artificial Sequence
  HTT spacer sequence GTCN PAM
caaaaaaaaaaaaaaauuaa

SEQ ID NO: 28080 - RNA, 20 nt, Artificial Sequence
  HTT spacer sequence GTCN PAM
uuuguacauuuggcuuucug

SEQ ID NO: 28081 - RNA, 20 nt, Artificial Sequence
  HTT spacer sequence GTCN PAM
uguuccuucuggguuaaauu

SEQ ID NO: 28082 - RNA, 20 nt, Artificial Sequence
  HTT spacer sequence GTCN PAM
uacugaaaaaucuaaauaau

SEQ ID NO: 28083 - RNA, 20 nt, Artificial Sequence
  HTT spacer sequence GTCN PAM
augucaucauuuuauuaaug

SEQ ID NO: 28084 - RNA, 20 nt, Artificial Sequence
  HTT spacer sequence GTCN PAM
ucauuuuauuaaugucauuc

SEQ ID NO: 28085 - RNA, 20 nt, Artificial Sequence
  HTT spacer sequence GTCN PAM
uuccaaacauagucucaaua

SEQ ID NO: 28086 - RNA, 20 nt, Artificial Sequence
  HTT spacer sequence GTCN PAM
caauaauaucacuucuuggu

SEQ ID NO: 28087 - RNA, 20 nt, Artificial Sequence
  HTT spacer sequence GTCN PAM
aaaccaagaagugauauuau

SEQ ID NO: 28088 - RNA, 20 nt, Artificial Sequence
  HTT spacer sequence GTCN PAM
augucaaaaccaagaaguga

SEQ ID NO: 28089 - RNA, 20 nt, Artificial Sequence
  HTT spacer sequence GTCN PAM
aaggccagucagcgugagaa

SEQ ID NO: 28090 - RNA, 20 nt, Artificial Sequence
  HTT spacer sequence GTCN PAM
gcgugagaagaccgcucggc

SEQ ID NO: 28091 - RNA, 20 nt, Artificial Sequence
  HTT spacer sequence GTCN PAM
ucucacgcugacuggccuug

SEQ ID NO: 28092 - RNA, 20 nt, Artificial Sequence
  HTT spacer sequence GTCN PAM
gggaguuggaaccgcagacu

SEQ ID NO: 28093 - RNA, 20 nt, Artificial Sequence
  HTT spacer sequence GTCN PAM
gcgguuccaacuccccgacu

SEQ ID NO: 28094 - RNA, 20 nt, Artificial Sequence
  HTT spacer sequence GTCN PAM
uggccuccagcagccacaug

SEQ ID NO: 28095 - RNA, 20 nt, Artificial Sequence
  HTT spacer sequence GTCN PAM
ggaaauggagacuccugcgu

SEQ ID NO: 28096 - RNA, 20 nt, Artificial Sequence
  HTT spacer sequence GTCN PAM
ccauuucccgacguucgucc

SEQ ID NO: 28097 - RNA, 20 nt, Artificial Sequence
  HTT spacer sequence GTCN PAM
cguccuaaagcugaagaaac

SEQ ID NO: 28098 - RNA, 20 nt, Artificial Sequence
  HTT spacer sequence GTCN PAM
uaaagcugaagaaacgcauu

SEQ ID NO: 28099 - RNA, 20 nt, Artificial Sequence
  HTT spacer sequence GTCN PAM
gugccacuccuagacaggcc

SEQ ID NO: 28100 - RNA, 20 nt, Artificial Sequence
  HTT spacer sequence GTCN PAM
aggaguggcacugaccagag

SEQ ID NO: 28101 - RNA, 20 nt, Artificial Sequence
  HTT spacer sequence GTCN PAM
ucaaacuggucugaggaccc

SEQ ID NO: 28102 - RNA, 20 nt, Artificial Sequence
  HTT spacer sequence GTCN PAM
gaggaccccucaacgcucuu

SEQ ID NO: 28103 - RNA, 20 nt, Artificial Sequence
  HTT spacer sequence GTCN PAM
ucagaccaguuugaggacgg

SEQ ID NO: 28104 - RNA, 20 nt, Artificial Sequence
  HTT spacer sequence GTCN PAM
uggccucccaaagugcuggg

SEQ ID NO: 28105 - RNA, 20 nt, Artificial Sequence
  HTT spacer sequence GTCN PAM
ggacauugagaucauccugg

SEQ ID NO: 28106 - RNA, 20 nt, Artificial Sequence
  HTT spacer sequence GTCN PAM
ugaccucgugauccgccugu

SEQ ID NO: 28107 - RNA, 20 nt, Artificial Sequence
  HTT spacer sequence GTCN PAM
cuacuaaaaauacaaaaaau

SEQ ID NO: 28108 - RNA, 20 nt, Artificial Sequence
  HTT spacer sequence GTCN PAM
cagcuacuugggaggcugag

SEQ ID NO: 28109 - RNA, 20 nt, Artificial Sequence
  HTT spacer sequence GTCN PAM
cgcucugcugcccaggcugg

SEQ ID NO: 28110 - RNA, 20 nt, Artificial Sequence
  HTT spacer sequence GTCN PAM
caaaaaaaaauaauaaauaa

SEQ ID NO: 28111 - RNA, 20 nt, Artificial Sequence
  HTT spacer sequence GTCN PAM
uuagaacucacauaagcaaa

SEQ ID NO: 28112 - RNA, 20 nt, Artificial Sequence
  HTT spacer sequence GTCN PAM
cagguuuaauuucuaauaag

SEQ ID NO: 28113 - RNA, 20 nt, Artificial Sequence
  HTT spacer sequence GTCN PAM
uggguuuauugcuauuuuga

SEQ ID NO: 28114 - RNA, 20 nt, Artificial Sequence
  HTT spacer sequence GTCN PAM
uaaaucucuggcuuaagaga

SEQ ID NO: 28115 - RNA, 20 nt, Artificial Sequence
  HTT spacer sequence GTCN PAM
guccacuuuggggguguuuu

SEQ ID NO: 28116 - RNA, 20 nt, Artificial Sequence
  HTT spacer sequence GTCN PAM
acuuuggggguguuuugguu

SEQ ID NO: 28117 - RNA, 20 nt, Artificial Sequence
  HTT spacer sequence GTCN PAM
aguguuggaauaggaucacg

SEQ ID NO: 28118 - RNA, 20 nt, Artificial Sequence
  HTT spacer sequence GTCN PAM
ccaaaaaaaaaaaacaaacc

SEQ ID NO: 28119 - RNA, 20 nt, Artificial Sequence
  HTT spacer sequence GTCN PAM
cgcucugucacucaggcugg

SEQ ID NO: 28120 - RNA, 20 nt, Artificial Sequence
  HTT spacer sequence GTCN PAM
cucaggcuggagugcagugg

SEQ ID NO: 28121 - RNA, 20 nt, Artificial Sequence
  HTT spacer sequence GTCN PAM
cagcuacucaggaggcugag

SEQ ID NO: 28122 - RNA, 20 nt, Artificial Sequence
  HTT spacer sequence GTCN PAM
caaucuccugacaucgugau

SEQ ID NO: 28123 - RNA, 20 nt, Artificial Sequence
  HTT spacer sequence GTCN PAM
ggagauugagaccauccugg

SEQ ID NO: 28124 - RNA, 20 nt, Artificial Sequence
  HTT spacer sequence GTCN PAM
gccgggcuaacaccuguaau

SEQ ID NO: 28125 - RNA, 20 nt, Artificial Sequence
  HTT spacer sequence GTCN PAM
gucuugugcuucaaggacuc

SEQ ID NO: 28126 - RNA, 20 nt, Artificial Sequence
  HTT spacer sequence GTCN PAM
ugugcuucaaggacucuguc

SEQ ID NO: 28127 - RNA, 20 nt, Artificial Sequence
  HTT spacer sequence GTCN PAM
uugaagcacaagacggacca

SEQ ID NO: 28128 - RNA, 20 nt, Artificial Sequence
  HTT spacer sequence GTCN PAM
aucaugccuuugugaccuca

SEQ ID NO: 28129 - RNA, 20 nt, Artificial Sequence
  HTT spacer sequence GTCN PAM
caaaggcaugauggacagag

SEQ ID NO: 28130 - RNA, 20 nt, Artificial Sequence
  HTT spacer sequence GTCN PAM
gcauuuggaauauccgcaua

SEQ ID NO: 28131 - RNA, 20 nt, Artificial Sequence
  HTT spacer sequence GTCN PAM
uucaguuggaaaggugguga

SEQ ID NO: 28132 - RNA, 20 nt, Artificial Sequence
  HTT spacer sequence GTCN PAM
uucagaauucugauuuuugc

SEQ ID NO: 28133 - RNA, 20 nt, Artificial Sequence
  HTT spacer sequence GTCN PAM
gcuauuuucuuugaaugaga

SEQ ID NO: 28134 - RNA, 20 nt, Artificial Sequence
  HTT spacer sequence GTCN PAM
cauucaaagaaaauagcuga

SEQ ID NO: 28135 - RNA, 20 nt, Artificial Sequence
  HTT spacer sequence GTCN PAM
gccaggacacccaaggcuga

SEQ ID NO: 28136 - RNA, 20 nt, Artificial Sequence
  HTT spacer sequence GTCN PAM
uggcagacuuuuuuuuuuug

SEQ ID NO: 28137 - RNA, 20 nt, Artificial Sequence
  HTT spacer sequence GTCN PAM
ggaucuggaacacacguaug

SEQ ID NO: 28138 - RNA, 20 nt, Artificial Sequence
  HTT spacer sequence GTCN PAM
acgcugaggaaaugcaggug

SEQ ID NO: 28139 - RNA, 20 nt, Artificial Sequence
  HTT spacer sequence GTCN PAM
ugcccgagcaacuggaaggc

SEQ ID NO: 28140 - RNA, 20 nt, Artificial Sequence
  HTT spacer sequence GTCN PAM
acaucuuuucaacguccugc

SEQ ID NO: 28141 - RNA, 20 nt, Artificial Sequence
  HTT spacer sequence GTCN PAM
agaccucacacacucgacca

SEQ ID NO: 28142 - RNA, 20 nt, Artificial Sequence
  HTT spacer sequence GTCN PAM
ugaccccuggguccacaucu

SEQ ID NO: 28143 - RNA, 20 nt, Artificial Sequence
  HTT spacer sequence GTCN PAM
agugugugaggucuugaccc

SEQ ID NO: 28144 - RNA, 20 nt, Artificial Sequence
  HTT spacer sequence GTCN PAM
gugauggagugaaaaugguc

SEQ ID NO: 28145 - RNA, 20 nt, Artificial Sequence
  HTT spacer sequence GTCN PAM
cuuccaaauguccgugaugg

SEQ ID NO: 28146 - RNA, 20 nt, Artificial Sequence
  HTT spacer sequence GTCN PAM
ugccacaucagugcgcaugu

SEQ ID NO: 28147 - RNA, 20 nt, Artificial Sequence
  HTT spacer sequence GTCN PAM
gcuccgugaagaccccguga

SEQ ID NO: 28148 - RNA, 20 nt, Artificial Sequence
  HTT spacer sequence GTCN PAM
ucacggagcugacaugcgca

SEQ ID NO: 28149 - RNA, 20 nt, Artificial Sequence
  HTT spacer sequence GTCN PAM
ucacggggucuucacggagc

SEQ ID NO: 28150 - RNA, 20 nt, Artificial Sequence
  HTT spacer sequence GTCN PAM
gaugaucacggggucuucac

SEQ ID NO: 28151 - RNA, 20 nt, Artificial Sequence
  HTT spacer sequence GTCN PAM
cugagguugcagcugcuuuc

SEQ ID NO: 28152 - RNA, 20 nt, Artificial Sequence
  HTT spacer sequence GTCN PAM
ccaagggucccugagguugc

SEQ ID NO: 28153 - RNA, 20 nt, Artificial Sequence
  HTT spacer sequence GTCN PAM
cggccugugggucaccaagg

SEQ ID NO: 28154 - RNA, 20 nt, Artificial Sequence
  HTT spacer sequence GTCN PAM
ccugugugcccgcuccagca

SEQ ID NO: 28155 - RNA, 20 nt, Artificial Sequence
  HTT spacer sequence GTCN PAM
guccuugcccgguacccaga

SEQ ID NO: 28156 - RNA, 20 nt, Artificial Sequence
  HTT spacer sequence GTCN PAM
uugcccgguacccagagcug

SEQ ID NO: 28157 - RNA, 20 nt, Artificial Sequence
  HTT spacer sequence GTCN PAM
accaaucgccagugagccag

SEQ ID NO: 28158 - RNA, 20 nt, Artificial Sequence
  HTT spacer sequence GTCN PAM
cacaaaggggcccuccgugu

SEQ ID NO: 28159 - RNA, 20 nt, Artificial Sequence
  HTT spacer sequence GTCN PAM
cacggagggccccuuugugu

SEQ ID NO: 28160 - RNA, 20 nt, Artificial Sequence
  HTT spacer sequence GTCN PAM
ucacagacagcgugugggaa

SEQ ID NO: 28161 - RNA, 20 nt, Artificial Sequence
  HTT spacer sequence GTCN PAM
gugaugacgccacccaguca

SEQ ID NO: 28162 - RNA, 20 nt, Artificial Sequence
  HTT spacer sequence GTCN PAM
cucugggcccgcuugggggc

SEQ ID NO: 28163 - RNA, 20 nt, Artificial Sequence
  HTT spacer sequence GTCN PAM
uguaggcacuggggauaggg

SEQ ID NO: 28164 - RNA, 20 nt, Artificial Sequence
  HTT spacer sequence GTCN PAM
gguggaaagcagauacaaau

SEQ ID NO: 28165 - RNA, 20 nt, Artificial Sequence
  HTT spacer sequence GTCN PAM
uuacaggguuucgaguugag

SEQ ID NO: 28166 - RNA, 20 nt, Artificial Sequence
  HTT spacer sequence GTCN PAM
agccccacccucaacucgaa

SEQ ID NO: 28167 - RNA, 20 nt, Artificial Sequence
  HTT spacer sequence GTCN PAM
aguauguuagaagagaggug

SEQ ID NO: 28168 - RNA, 20 nt, Artificial Sequence
  HTT spacer sequence GTCN PAM
ugugagcggauggaguggga

SEQ ID NO: 28169 - RNA, 20 nt, Artificial Sequence
  HTT spacer sequence GTCN PAM
aggugggagcuggcucugag

SEQ ID NO: 28170 - RNA, 20 nt, Artificial Sequence
  HTT spacer sequence GTCN PAM
aggcccaccucgcccucaga

SEQ ID NO: 28171 - RNA, 20 nt, Artificial Sequence
  HTT spacer sequence GTCN PAM
cuguccaggcccaccucgcc

SEQ ID NO: 28172 - RNA, 20 nt, Artificial Sequence
  HTT spacer sequence GTCN PAM
cagcagaaagcagggugucc

SEQ ID NO: 28173 - RNA, 20 nt, Artificial Sequence
  HTT spacer sequence GTCN PAM
cggagcagggagggucaggu

SEQ ID NO: 28174 - RNA, 20 nt, Artificial Sequence
  HTT spacer sequence GTCN PAM
gguguggcguggagccuggg

SEQ ID NO: 28175 - RNA, 20 nt, Artificial Sequence
  HTT spacer sequence GTCN PAM
aaccauucuauccuccccua

SEQ ID NO: 28176 - RNA, 20 nt, Artificial Sequence
  HTT spacer sequence GTCN PAM
uggagauggccacgagcgca

SEQ ID NO: 28177 - RNA, 20 nt, Artificial Sequence
  HTT spacer sequence GTCN PAM
ggagggagagggcacccuac

SEQ ID NO: 28178 - RNA, 20 nt, Artificial Sequence
  HTT spacer sequence GTCN PAM
ccaggggcuuccaacuggcu

SEQ ID NO: 28179 - RNA, 20 nt, Artificial Sequence
  HTT spacer sequence GTCN PAM
guucuuggcuucuauuuuag

SEQ ID NO: 28180 - RNA, 20 nt, Artificial Sequence
  HTT spacer sequence GTCN PAM
cucacagaugugucaguucu

SEQ ID NO: 28181 - RNA, 20 nt, Artificial Sequence
  HTT spacer sequence GTCN PAM
ugucccucacagauguguca

SEQ ID NO: 28182 - RNA, 20 nt, Artificial Sequence
  HTT spacer sequence GTCN PAM
cugcacaagccacggaugua

SEQ ID NO: 28183 - RNA, 20 nt, Artificial Sequence
  HTT spacer sequence GTCN PAM
cacuucccugagcugagggg

SEQ ID NO: 28184 - RNA, 20 nt, Artificial Sequence
  HTT spacer sequence GTCN PAM
accuggugccuuucgcugcc

SEQ ID NO: 28185 - RNA, 20 nt, Artificial Sequence
  HTT spacer sequence GTCN PAM
aggcuaaucugcucuccugc

SEQ ID NO: 28186 - RNA, 20 nt, Artificial Sequence
  HTT spacer sequence GTCN PAM
agaccuugagcgccucgucc

SEQ ID NO: 28187 - RNA, 20 nt, Artificial Sequence
  HTT spacer sequence GTCN PAM
ggacaugguggugcagagca

SEQ ID NO: 28188 - RNA, 20 nt, Artificial Sequence
  HTT spacer sequence GTCN PAM
cccacaaaugucauauuuac

SEQ ID NO: 28189 - RNA, 20 nt, Artificial Sequence
  HTT spacer sequence GTCN PAM
uauuuacccccuagaggacc

SEQ ID NO: 28190 - RNA, 20 nt, Artificial Sequence
  HTT spacer sequence GTCN PAM
ucuaggggguaaauaugaca

SEQ ID NO: 28191 - RNA, 20 nt, Artificial Sequence
  HTT spacer sequence GTCN PAM
ucuagguccucuagggggua

SEQ ID NO: 28192 - RNA, 20 nt, Artificial Sequence
  HTT spacer sequence GTCN PAM
caggucugcccuccccguug

SEQ ID NO: 28193 - RNA, 20 nt, Artificial Sequence
  HTT spacer sequence GTCN PAM
gcccuccccguuggggccaa

SEQ ID NO: 28194 - RNA, 20 nt, Artificial Sequence
  HTT spacer sequence GTCN PAM
ggcacuuggccccaacgggg

SEQ ID NO: 28195 - RNA, 20 nt, Artificial Sequence
  HTT spacer sequence GTCN PAM
cagccuuucuuagggagugc

SEQ ID NO: 28196 - RNA, 20 nt, Artificial Sequence
  HTT spacer sequence GTCN PAM
ucucucgcccugggcacacc

SEQ ID NO: 28197 - RNA, 20 nt, Artificial Sequence
  HTT spacer sequence GTCN PAM
ggggucuuggacagcucuuc

SEQ ID NO: 28198 - RNA, 20 nt, Artificial Sequence
  HTT spacer sequence GTCN PAM
uggacagcucuuccuaggag

SEQ ID NO: 28199 - RNA, 20 nt, Artificial Sequence
  HTT spacer sequence GTCN PAM
aagaccccagacauccccuc

SEQ ID NO: 28200 - RNA, 20 nt, Artificial Sequence
  HTT spacer sequence GTCN PAM
cggaggaagcccugcagcuu

SEQ ID NO: 28201 - RNA, 20 nt, Artificial Sequence
  HTT spacer sequence GTCN PAM
gaucucacagagacugugug

SEQ ID NO: 28202 - RNA, 20 nt, Artificial Sequence
  HTT spacer sequence GTCN PAM
cugugagaucggacucaggc

SEQ ID NO: 28203 - RNA, 20 nt, Artificial Sequence
  HTT spacer sequence GTCN PAM
cgagggcgagcagcagcuca

SEQ ID NO: 28204 - RNA, 20 nt, Artificial Sequence
  HTT spacer sequence GTCN PAM
guccccugcccaggcuuuuc

SEQ ID NO: 28205 - RNA, 20 nt, Artificial Sequence
  HTT spacer sequence GTCN PAM
ccugcccaggcuuuucucgc

SEQ ID NO: 28206 - RNA, 20 nt, Artificial Sequence
  HTT spacer sequence GTCN PAM
ucucgugggucccuuacuga

SEQ ID NO: 28207 - RNA, 20 nt, Artificial Sequence
  HTT spacer sequence GTCN PAM
cuuacugauggagagacugu

SEQ ID NO: 28208 - RNA, 20 nt, Artificial Sequence
  HTT spacer sequence GTCN PAM
cuccaucaguaagggaccca

SEQ ID NO: 28209 - RNA, 20 nt, Artificial Sequence
  HTT spacer sequence GTCN PAM
cucuguguacuuguguacac

SEQ ID NO: 28210 - RNA, 20 nt, Artificial Sequence
  HTT spacer sequence GTCN PAM
cauccuucaaaacucacuag

SEQ ID NO: 28211 - RNA, 20 nt, Artificial Sequence
  HTT spacer sequence GTCN PAM
ggcuacaaauggcuuacacg

SEQ ID NO: 28212 - RNA, 20 nt, Artificial Sequence
  HTT spacer sequence GTCN PAM
gguugagauuuacuuuuuuc

SEQ ID NO: 28213 - RNA, 20 nt, Artificial Sequence
  HTT spacer sequence GTCN PAM
ugucgcuauggaguggcuuu

SEQ ID NO: 28214 - RNA, 20 nt, Artificial Sequence
  HTT spacer sequence GTCN PAM
cuauggaguggcuuuggacu

SEQ ID NO: 28215 - RNA, 20 nt, Artificial Sequence
  HTT spacer sequence GTCN PAM
aaagccacuccauagcgaca

SEQ ID NO: 28216 - RNA, 20 nt, Artificial Sequence
  HTT spacer sequence GTCN PAM
ggcccgcucuggagucugca

SEQ ID NO: 28217 - RNA, 20 nt, Artificial Sequence
  HTT spacer sequence GTCN PAM
ccauucauguuaugaaccaa

SEQ ID NO: 28218 - RNA, 20 nt, Artificial Sequence
  HTT spacer sequence GTCN PAM
aaggccaauuucugacgcua

SEQ ID NO: 28219 - RNA, 20 nt, Artificial Sequence
  HTT spacer sequence GTCN PAM
gaaauuggccuuggacacuc

SEQ ID NO: 28220 - RNA, 20 nt, Artificial Sequence
  HTT spacer sequence GTCN PAM
guagaacacuccagaaugua

SEQ ID NO: 28221 - RNA, 20 nt, Artificial Sequence
  HTT spacer sequence GTCN PAM
uggcagauggugucaguaga

SEQ ID NO: 28222 - RNA, 20 nt, Artificial Sequence
  HTT spacer sequence GTCN PAM
gcucuagaagcacacaggug

SEQ ID NO: 28223 - RNA, 20 nt, Artificial Sequence
  HTT spacer sequence GTCN PAM
gaggugaggcagcggggauu

SEQ ID NO: 28224 - RNA, 20 nt, Artificial Sequence
  HTT spacer sequence GTCN PAM
gggccaugguuggcagaggc

SEQ ID NO: 28225 - RNA, 20 nt, Artificial Sequence
  HTT spacer sequence GTCN PAM
ggagaagcaagacagggaug

SEQ ID NO: 28226 - RNA, 20 nt, Artificial Sequence
  HTT spacer sequence GTCN PAM
ugcuucuccugaccaucagu

SEQ ID NO: 28227 - RNA, 20 nt, Artificial Sequence
  HTT spacer sequence GTCN PAM
gcuccuccugcugugugcag

SEQ ID NO: 28228 - RNA, 20 nt, Artificial Sequence
  HTT spacer sequence GTCN PAM
gcagggcccggcaggaagga

SEQ ID NO: 28229 - RNA, 20 nt, Artificial Sequence
  HTT spacer sequence GTCN PAM
gggcuggucagcagggcccg

SEQ ID NO: 28230 - RNA, 20 nt, Artificial Sequence
  HTT spacer sequence GTCN PAM
gcagccggggcagccagcug

SEQ ID NO: 28231 - RNA, 20 nt, Artificial Sequence
  HTT spacer sequence GTCN PAM
caugagacaagugagauacc

SEQ ID NO: 28232 - RNA, 20 nt, Artificial Sequence
  HTT spacer sequence GTCN PAM
caugggacccugcaggcucc

SEQ ID NO: 28233 - RNA, 20 nt, Artificial Sequence
  HTT spacer sequence GTCN PAM
guuugcgcaagaagcaauau

SEQ ID NO: 28234 - RNA, 20 nt, Artificial Sequence
  HTT spacer sequence GTCN PAM
ggcucuccaucggccuucua

SEQ ID NO: 28235 - RNA, 20 nt, Artificial Sequence
  HTT spacer sequence GTCN PAM
ugagggugagggccacgccc

SEQ ID NO: 28236 - RNA, 20 nt, Artificial Sequence
  HTT spacer sequence GTCN PAM
ccugggccuggcugcuucug

SEQ ID NO: 28237 - RNA, 20 nt, Artificial Sequence
  HTT spacer sequence GTCN PAM
cccacagaagcagccaggcc

SEQ ID NO: 28238 - RNA, 20 nt, Artificial Sequence
  HTT spacer sequence GTCN PAM
uuuucaacacucccuccccu

SEQ ID NO: 28239 - RNA, 20 nt, Artificial Sequence
  HTT spacer sequence GTCN PAM
cacugucaccugggccuccu

SEQ ID NO: 28240 - RNA, 20 nt, Artificial Sequence
  HTT spacer sequence GTCN PAM
ccugggccuccugggccagc

SEQ ID NO: 28241 - RNA, 20 nt, Artificial Sequence
  HTT spacer sequence GTCN PAM
gcuggcccaggaggcccagg

SEQ ID NO: 28242 - RNA, 20 nt, Artificial Sequence
  HTT spacer sequence GTCN PAM
gcaaaguuccccaagaagga

SEQ ID NO: 28243 - RNA, 20 nt, Artificial Sequence
  HTT spacer sequence GTCN PAM
ccaggcugccgacauugcag

SEQ ID NO: 28244 - RNA, 20 nt, Artificial Sequence
  HTT spacer sequence GTCN PAM
gcagccuggggacagcccug

SEQ ID NO: 28245 - RNA, 20 nt, Artificial Sequence
  HTT spacer sequence GTCN PAM
aguccuaggcacacaccauu

SEQ ID NO: 28246 - RNA, 20 nt, Artificial Sequence
  HTT spacer sequence GTCN PAM
uaggcacacaccauugucac

SEQ ID NO: 28247 - RNA, 20 nt, Artificial Sequence
  HTT spacer sequence GTCN PAM
cuucaccaggcuccacgggg

SEQ ID NO: 28248 - RNA, 20 nt, Artificial Sequence
  HTT spacer sequence GTCN PAM
ccagaucuggggccccgugg

SEQ ID NO: 28249 - RNA, 20 nt, Artificial Sequence
  HTT spacer sequence GTCN PAM
agucaccggacucugcggac

SEQ ID NO: 28250 - RNA, 20 nt, Artificial Sequence
  HTT spacer sequence GTCN PAM
ccggacucugcggacacaga

SEQ ID NO: 28251 - RNA, 20 nt, Artificial Sequence
  HTT spacer sequence GTCN PAM
ggugacuggacaguccccag

SEQ ID NO: 28252 - RNA, 20 nt, Artificial Sequence
  HTT spacer sequence GTCN PAM
gcagaguccggugacuggac

SEQ ID NO: 28253 - RNA, 20 nt, Artificial Sequence
  HTT spacer sequence GTCN PAM
aaucugaccccauccugccu

SEQ ID NO: 28254 - RNA, 20 nt, Artificial Sequence
  HTT spacer sequence GTCN PAM
gauuugacucuguguccgca

SEQ ID NO: 28255 - RNA, 20 nt, Artificial Sequence
  HTT spacer sequence GTCN PAM
ggguacacugggccuguggg

SEQ ID NO: 28256 - RNA, 20 nt, Artificial Sequence
  HTT spacer sequence GTCN PAM
augaggagggcagggcagcc

SEQ ID NO: 28257 - RNA, 20 nt, Artificial Sequence
  HTT spacer sequence GTCN PAM
ugcucagcccuagacuggcu

SEQ ID NO: 28258 - RNA, 20 nt, Artificial Sequence
  HTT spacer sequence GTCN PAM
agggcugagcaagaccugag

SEQ ID NO: 28259 - RNA, 20 nt, Artificial Sequence
  HTT spacer sequence GTCN PAM
gagccagucuagggcugagc

SEQ ID NO: 28260 - RNA, 20 nt, Artificial Sequence
  HTT spacer sequence GTCN PAM
ggaccccacagcagcagggc

SEQ ID NO: 28261 - RNA, 20 nt, Artificial Sequence
  HTT spacer sequence GTCN PAM
ugaccucaccccaccacguu

SEQ ID NO: 28262 - RNA, 20 nt, Artificial Sequence
  HTT spacer sequence GTCN PAM
uccuggguggcccugcugcu

SEQ ID NO: 28263 - RNA, 20 nt, Artificial Sequence
  HTT spacer sequence GTCN PAM
caggcuguggcccauguacc

SEQ ID NO: 28264 - RNA, 20 nt, Artificial Sequence
  HTT spacer sequence GTCN PAM
ccaagucaggaggaaggagg

SEQ ID NO: 28265 - RNA, 20 nt, Artificial Sequence
  HTT spacer sequence GTCN PAM
ggaggaaggaggccaggagu

SEQ ID NO: 28266 - RNA, 20 nt, Artificial Sequence
  HTT spacer sequence GTCN PAM
uacugcucgggguccagguu

SEQ ID NO: 28267 - RNA, 20 nt, Artificial Sequence
  HTT spacer sequence GTCN PAM
agguucuggggcucuguccu

SEQ ID NO: 28268 - RNA, 20 nt, Artificial Sequence
  HTT spacer sequence GTCN PAM
ucugcgagcaccucucagcc

SEQ ID NO: 28269 - RNA, 20 nt, Artificial Sequence
  HTT spacer sequence GTCN PAM
gugcagcacuguggggaagg

SEQ ID NO: 28270 - RNA, 20 nt, Artificial Sequence
  HTT spacer sequence GTCN PAM
aacccugcggggaacuaagg

SEQ ID NO: 28271 - RNA, 20 nt, Artificial Sequence
  HTT spacer sequence GTCN PAM
ggagucuaacccugcgggga

SEQ ID NO: 28272 - RNA, 20 nt, Artificial Sequence
  HTT spacer sequence GTCN PAM
ggaguccggccucccccaac

SEQ ID NO: 28273 - RNA, 20 nt, Artificial Sequence
  HTT spacer sequence GTCN PAM
ggccucccccaacagcccac

SEQ ID NO: 28274 - RNA, 20 nt, Artificial Sequence
  HTT spacer sequence GTCN PAM
gccccgugguugaauccaaa

SEQ ID NO: 28275 - RNA, 20 nt, Artificial Sequence
  HTT spacer sequence GTCN PAM
uuuccuguucaaagaacuuu

SEQ ID NO: 28276 - RNA, 20 nt, Artificial Sequence
  HTT spacer sequence GTCN PAM
cuugaaaguucuuugaacag

SEQ ID NO: 28277 - RNA, 20 nt, Artificial Sequence
  HTT spacer sequence GTCN PAM
cuguaauuuaaugauaauug

SEQ ID NO: 28278 - RNA, 20 nt, Artificial Sequence
  HTT spacer sequence GTCN PAM
cauuuucucccuuacaggca

SEQ ID NO: 28279 - RNA, 20 nt, Artificial Sequence
  HTT spacer sequence GTCN PAM
uggucagguggaggagaccu

SEQ ID NO: 28280 - RNA, 20 nt, Artificial Sequence
  HTT spacer sequence GTCN PAM
gguggaggagaccugugucc

SEQ ID NO: 28281 - RNA, 20 nt, Artificial Sequence
  HTT spacer sequence GTCN PAM
ccuccaccugaccaggacgg

SEQ ID NO: 28282 - RNA, 20 nt, Artificial Sequence
  HTT spacer sequence GTCN PAM
uggacuuuggaccccgaggc

SEQ ID NO: 28283 - RNA, 20 nt, Artificial Sequence
  HTT spacer sequence GTCN PAM
aggacacaggucuccuccac

SEQ ID NO: 28284 - RNA, 20 nt, Artificial Sequence
  HTT spacer sequence GTCN PAM
aaaguccaggacacaggucu

SEQ ID NO: 28285 - RNA, 20 nt, Artificial Sequence
  HTT spacer sequence GTCN PAM
accugccccacagccacagc

SEQ ID NO: 28286 - RNA, 20 nt, Artificial Sequence
  HTT spacer sequence GTCN PAM
cacuugauaagaacugacau

SEQ ID NO: 28287 - RNA, 20 nt, Artificial Sequence
  HTT spacer sequence GTCN PAM
uuauucacacacagauaaga

SEQ ID NO: 28288 - RNA, 20 nt, Artificial Sequence
  HTT spacer sequence GTCN PAM
uuuauuucucuuucuugccu

SEQ ID NO: 28289 - RNA, 20 nt, Artificial Sequence
  HTT spacer sequence GTCN PAM
guguucaugagggucauugg

SEQ ID NO: 28290 - RNA, 20 nt, Artificial Sequence
  HTT spacer sequence GTCN PAM
uugggcuguaauuucuuuuu

SEQ ID NO: 28291 - RNA, 20 nt, Artificial Sequence
  HTT spacer sequence GTCN PAM
uugucagguuuugauaucag

SEQ ID NO: 28292 - RNA, 20 nt, Artificial Sequence
  HTT spacer sequence GTCN PAM
gguuuugauaucagaguuac

SEQ ID NO: 28293 - RNA, 20 nt, Artificial Sequence
  HTT spacer sequence GTCN PAM
uucccuuccuucuauuuacu

SEQ ID NO: 28294 - RNA, 20 nt, Artificial Sequence
  HTT spacer sequence GTCN PAM
aacaagauaucacaaagaaa

SEQ ID NO: 28295 - RNA, 20 nt, Artificial Sequence
  HTT spacer sequence GTCN PAM
uuuagcauuuaaugagauuu

SEQ ID NO: 28296 - RNA, 20 nt, Artificial Sequence
  HTT spacer sequence GTCN PAM
ucuauauguguuaauuaggu

SEQ ID NO: 28297 - RNA, 20 nt, Artificial Sequence
  HTT spacer sequence GTCN PAM
gguuuucccaacaauuuaua

SEQ ID NO: 28298 - RNA, 20 nt, Artificial Sequence
  HTT spacer sequence GTCN PAM
uuuuuggcuugacuuucuuu

SEQ ID NO: 28299 - RNA, 20 nt, Artificial Sequence
  HTT spacer sequence GTCN PAM
agccaaaaaugacacuauca

SEQ ID NO: 28300 - RNA, 20 nt, Artificial Sequence
  HTT spacer sequence GTCN PAM
acuugucuuguuuuucuuca

SEQ ID NO: 28301 - RNA, 20 nt, Artificial Sequence
  HTT spacer sequence GTCN PAM
uguuuuucuucauauuucua

SEQ ID NO: 28302 - RNA, 20 nt, Artificial Sequence
  HTT spacer sequence GTCN PAM
cuacaggaucgcguggcagu

SEQ ID NO: 28303 - RNA, 20 nt, Artificial Sequence
  HTT spacer sequence GTCN PAM
aggggaggcuguggaggcug

SEQ ID NO: 28304 - RNA, 20 nt, Artificial Sequence
  HTT spacer sequence GTCN PAM
caucuuugggaagaugcaga

SEQ ID NO: 28305 - RNA, 20 nt, Artificial Sequence
  HTT spacer sequence GTCN PAM
agaugucccaucuuugggaa

SEQ ID NO: 28306 - RNA, 20 nt, Artificial Sequence
  HTT spacer sequence GTCN PAM
aauaugauacacauugaguc

SEQ ID NO: 28307 - RNA, 20 nt, Artificial Sequence
  HTT spacer sequence GTCN PAM
acuaaaugcuguuaaagcaa

SEQ ID NO: 28308 - RNA, 20 nt, Artificial Sequence
  HTT spacer sequence GTCN PAM
accuucuuuucuuuccuuuu

SEQ ID NO: 28309 - RNA, 20 nt, Artificial Sequence
  HTT spacer sequence GTCN PAM
acuacaaagaccucauguaa

SEQ ID NO: 28310 - RNA, 20 nt, Artificial Sequence
  HTT spacer sequence GTCN PAM
uuguaguagacaaaagccau

SEQ ID NO: 28311 - RNA, 20 nt, Artificial Sequence
  HTT spacer sequence GTCN PAM
uggaacuccuacccucaagu

SEQ ID NO: 28312 - RNA, 20 nt, Artificial Sequence
  HTT spacer sequence GTCN PAM
cccccacgaugggcagcagc

SEQ ID NO: 28313 - RNA, 20 nt, Artificial Sequence
  HTT spacer sequence GTCN PAM
agugaaaauacguuucucuu

SEQ ID NO: 28314 - RNA, 20 nt, Artificial Sequence
  HTT spacer sequence GTCN PAM
gaagcaucuggauaaaaaug

SEQ ID NO: 28315 - RNA, 20 nt, Artificial Sequence
  HTT spacer sequence GTCN PAM
gccacaugauggugcccaca

SEQ ID NO: 28316 - RNA, 20 nt, Artificial Sequence
  HTT spacer sequence GTCN PAM
ccuuuauuucuucaaccauu

SEQ ID NO: 28317 - RNA, 20 nt, Artificial Sequence
  HTT spacer sequence GTCN PAM
uuguuucuggcuauuuucaa

SEQ ID NO: 28318 - RNA, 20 nt, Artificial Sequence
  HTT spacer sequence GTCN PAM
gccaaaauaugcaucauugu

SEQ ID NO: 28319 - RNA, 20 nt, Artificial Sequence
  HTT spacer sequence GTCN PAM
gaggacaauaaaaugacaac

SEQ ID NO: 28320 - RNA, 20 nt, Artificial Sequence
  HTT spacer sequence GTCN PAM
ucugaccacuauuauuucug

SEQ ID NO: 28321 - RNA, 20 nt, Artificial Sequence
  HTT spacer sequence GTCN PAM
uuuuauuguccucugaccac

SEQ ID NO: 28322 - RNA, 20 nt, Artificial Sequence
  HTT spacer sequence GTCN PAM
caaaaaaauaauaauaaaac

SEQ ID NO: 28323 - RNA, 20 nt, Artificial Sequence
  HTT spacer sequence GTCN PAM
gauagcccuucguucccuga

SEQ ID NO: 28324 - RNA, 20 nt, Artificial Sequence
  HTT spacer sequence GTCN PAM
cccagcggggcgguggggua

SEQ ID NO: 28325 - RNA, 20 nt, Artificial Sequence
  HTT spacer sequence GTCN PAM
gggaaguugaggcugcagug

SEQ ID NO: 28326 - RNA, 20 nt, Artificial Sequence
  HTT spacer sequence GTCN PAM
ugcccuguugcccaggcuag

SEQ ID NO: 28327 - RNA, 20 nt, Artificial Sequence
  HTT spacer sequence GTCN PAM
acuuaauuaaugcauauuuu

SEQ ID NO: 28328 - RNA, 20 nt, Artificial Sequence
  HTT spacer sequence GTCN PAM
ccaaauaaaauaugcauuaa

SEQ ID NO: 28329 - RNA, 20 nt, Artificial Sequence
  HTT spacer sequence GTCN PAM
cuaauugccaugagcucuac

SEQ ID NO: 28330 - RNA, 20 nt, Artificial Sequence
  HTT spacer sequence GTCN PAM
cuaccaaaaacacaaaaaau

SEQ ID NO: 28331 - RNA, 20 nt, Artificial Sequence
  HTT spacer sequence GTCN PAM
ccaacuccugagcuuaagug

SEQ ID NO: 28332 - RNA, 20 nt, Artificial Sequence
  HTT spacer sequence GTCN PAM
cugcccuggagccucaggag

SEQ ID NO: 28333 - RNA, 20 nt, Artificial Sequence
  HTT spacer sequence GTCN PAM
ccuaggcuggagugcagugg

SEQ ID NO: 28334 - RNA, 20 nt, Artificial Sequence
  HTT spacer sequence GTCN PAM
cccugccccuuccuuccugc

SEQ ID NO: 28335 - RNA, 20 nt, Artificial Sequence
  HTT spacer sequence GTCN PAM
uccuuccccggcgcuggguc

SEQ ID NO: 28336 - RNA, 20 nt, Artificial Sequence
  HTT spacer sequence GTCN PAM
ccgccccuccuccggccucg

SEQ ID NO: 28337 - RNA, 20 nt, Artificial Sequence
  HTT spacer sequence GTCN PAM
aggcgagggcggggccgagg

SEQ ID NO: 28338 - RNA, 20 nt, Artificial Sequence
  HTT spacer sequence GTCN PAM
ccucggcagccaccgccccc

SEQ ID NO: 28339 - RNA, 20 nt, Artificial Sequence
  HTT spacer sequence GTCN PAM
gacuccacgagcggccgcuu

SEQ ID NO: 28340 - RNA, 20 nt, Artificial Sequence
  HTT spacer sequence GTCN PAM
gacgagggaacccucccagc

SEQ ID NO: 28341 - RNA, 20 nt, Artificial Sequence
  HTT spacer sequence GTCN PAM
cggaaggcagcuucugcccu

SEQ ID NO: 28342 - RNA, 20 nt, Artificial Sequence
  HTT spacer sequence GTCN PAM
acacuccacggcucugggcc

SEQ ID NO: 28343 - RNA, 20 nt, Artificial Sequence
  HTT spacer sequence GTCN PAM
acacuagauggcucugggcc

SEQ ID NO: 28344 - RNA, 20 nt, Artificial Sequence
  HTT spacer sequence GTCN PAM
ccucucugucuacacuagau

SEQ ID NO: 28345 - RNA, 20 nt, Artificial Sequence
  HTT spacer sequence GTCN PAM
acacuccacagcuauggguc

SEQ ID NO: 28346 - RNA, 20 nt, Artificial Sequence
  HTT spacer sequence GTCN PAM
cuugcugggaaugugucccu

SEQ ID NO: 28347 - RNA, 20 nt, Artificial Sequence
  HTT spacer sequence GTCN PAM
cugggcaggugaccaccuuc

SEQ ID NO: 28348 - RNA, 20 nt, Artificial Sequence
  HTT spacer sequence GTCN PAM
ccugcccagggacacauucc

SEQ ID NO: 28349 - RNA, 20 nt, Artificial Sequence
  HTT spacer sequence GTCN PAM
aucguggccagugcuuuugg

SEQ ID NO: 28350 - RNA, 20 nt, Artificial Sequence
  HTT spacer sequence GTCN PAM
ccaaaagcacuggccacgau

SEQ ID NO: 28351 - RNA, 20 nt, Artificial Sequence
  HTT spacer sequence GTCN PAM
gggucuuuuucuuaaaacug

SEQ ID NO: 28352 - RNA, 20 nt, Artificial Sequence
  HTT spacer sequence GTCN PAM
uuuucuuaaaacugcaaguc

SEQ ID NO: 28353 - RNA, 20 nt, Artificial Sequence
  HTT spacer sequence GTCN PAM
cagaggcauccgcaucauug

SEQ ID NO: 28354 - RNA, 20 nt, Artificial Sequence
  HTT spacer sequence GTCN PAM
cuccucccucugcucugcca

SEQ ID NO: 28355 - RNA, 20 nt, Artificial Sequence
  HTT spacer sequence GTCN PAM
ccacugcccugucgcuccuc

SEQ ID NO: 28356 - RNA, 20 nt, Artificial Sequence
  HTT spacer sequence GTCN PAM
cagggagguugacaaagaca

SEQ ID NO: 28357 - RNA, 20 nt, Artificial Sequence
  HTT spacer sequence GTCN PAM
accucccugagaccuccggu

SEQ ID NO: 28358 - RNA, 20 nt, Artificial Sequence
  HTT spacer sequence GTCN PAM
uugucaaccucccugagacc

SEQ ID NO: 28359 - RNA, 20 nt, Artificial Sequence
  HTT spacer sequence GTCN PAM
agggcuggcucccuuucugc

SEQ ID NO: 28360 - RNA, 20 nt, Artificial Sequence
  HTT spacer sequence GTCN PAM
cggggaagaagggguggcca

SEQ ID NO: 28361 - RNA, 20 nt, Artificial Sequence
  HTT spacer sequence GTCN PAM
gggcuuuaggauuuugugug

SEQ ID NO: 28362 - RNA, 20 nt, Artificial Sequence
  HTT spacer sequence GTCN PAM
uugauuuagaaaacaucuuu

SEQ ID NO: 28363 - RNA, 20 nt, Artificial Sequence
  HTT spacer sequence GTCN PAM
aaaauuuuauacccagcuaa

SEQ ID NO: 28364 - RNA, 20 nt, Artificial Sequence
  HTT spacer sequence GTCN PAM
cuuaaaaaaaaaauugaaca

SEQ ID NO: 28365 - RNA, 20 nt, Artificial Sequence
  HTT spacer sequence GTCN PAM
cacucuuuugcccaggcugg

SEQ ID NO: 28366 - RNA, 20 nt, Artificial Sequence
  HTT spacer sequence GTCN PAM
uagcucgcugcagccccaaa

SEQ ID NO: 28367 - RNA, 20 nt, Artificial Sequence
  HTT spacer sequence GTCN PAM
ugugucugguuggaacuuga

SEQ ID NO: 28368 - RNA, 20 nt, Artificial Sequence
  HTT spacer sequence GTCN PAM
gguuggaacuugauuuagca

SEQ ID NO: 28369 - RNA, 20 nt, Artificial Sequence
  HTT spacer sequence GTCN PAM
auuuacggacagagcugccg

SEQ ID NO: 28370 - RNA, 20 nt, Artificial Sequence
  HTT spacer sequence GTCN PAM
guaaauugacaguucccaca

SEQ ID NO: 28371 - RNA, 20 nt, Artificial Sequence
  HTT spacer sequence GTCN PAM
aggcaggugcaguggggcaa

SEQ ID NO: 28372 - RNA, 20 nt, Artificial Sequence
  HTT spacer sequence GTCN PAM
caagggcacagcgcuucagg

SEQ ID NO: 28373 - RNA, 20 nt, Artificial Sequence
  HTT spacer sequence GTCN PAM
uggcugcccuccucuguaac

SEQ ID NO: 28374 - RNA, 20 nt, Artificial Sequence
  HTT spacer sequence GTCN PAM
gucccggcugcccuccucug

SEQ ID NO: 28375 - RNA, 20 nt, Artificial Sequence
  HTT spacer sequence GTCN PAM
cggcugcccuccucuguaac

SEQ ID NO: 28376 - RNA, 20 nt, Artificial Sequence
  HTT spacer sequence GTCN PAM
guccccggcugcccuccucu

SEQ ID NO: 28377 - RNA, 20 nt, Artificial Sequence
  HTT spacer sequence GTCN PAM
ccggcugcccuccucuguaa

SEQ ID NO: 28378 - RNA, 20 nt, Artificial Sequence
  HTT spacer sequence GTCN PAM
cacucugcacagauuuaaaa

SEQ ID NO: 28379 - RNA, 20 nt, Artificial Sequence
  HTT spacer sequence GTCN PAM
aauacaaauggaaaggaaga

SEQ ID NO: 28380 - RNA, 20 nt, Artificial Sequence
  HTT spacer sequence GTCN PAM
cuccccaaaccucaacaucc

SEQ ID NO: 28381 - RNA, 20 nt, Artificial Sequence
  HTT spacer sequence GTCN PAM
agccucuugaggcucucuca

SEQ ID NO: 28382 - RNA, 20 nt, Artificial Sequence
  HTT spacer sequence GTCN PAM
cacuggguccagccucuuga

SEQ ID NO: 28383 - RNA, 20 nt, Artificial Sequence
  HTT spacer sequence GTCN PAM
agcaggagguguggccacca

SEQ ID NO: 28384 - RNA, 20 nt, Artificial Sequence
  HTT spacer sequence GTCN PAM
ccguaccgaggcucaccuug

SEQ ID NO: 28385 - RNA, 20 nt, Artificial Sequence
  HTT spacer sequence GTCN PAM
ucuaacagcgauauuagcga

SEQ ID NO: 28386 - RNA, 20 nt, Artificial Sequence
  HTT spacer sequence GTCN PAM
cuggccaacagccagcaggg

SEQ ID NO: 28387 - RNA, 20 nt, Artificial Sequence
  HTT spacer sequence GTCN PAM
cgugggcggcuuccuugggc

SEQ ID NO: 28388 - RNA, 20 nt, Artificial Sequence
  HTT spacer sequence GTCN PAM
gggagugacgguggauucca

SEQ ID NO: 28389 - RNA, 20 nt, Artificial Sequence
  HTT spacer sequence GTCN PAM
cucccugaccccaaacccca

SEQ ID NO: 28390 - RNA, 20 nt, Artificial Sequence
  HTT spacer sequence GTCN PAM
uccuuggaaccugugguugc

SEQ ID NO: 28391 - RNA, 20 nt, Artificial Sequence
  HTT spacer sequence GTCN PAM
ucacaacacaaucacuuacu

SEQ ID NO: 28392 - RNA, 20 nt, Artificial Sequence
  HTT spacer sequence GTCN PAM
ugcagaagagacuacacagc

SEQ ID NO: 28393 - RNA, 20 nt, Artificial Sequence
  HTT spacer sequence GTCN PAM
cuucugcaagacucuuuaaa

SEQ ID NO: 28394 - RNA, 20 nt, Artificial Sequence
  HTT spacer sequence GTCN PAM
cgggccugcuguguagucuc

SEQ ID NO: 28395 - RNA, 20 nt, Artificial Sequence
  HTT spacer sequence GTCN PAM
cauuguucccuuggagccau

SEQ ID NO: 28396 - RNA, 20 nt, Artificial Sequence
  HTT spacer sequence GTCN PAM
uggaagcucaucagaauguu

SEQ ID NO: 28397 - RNA, 20 nt, Artificial Sequence
  HTT spacer sequence GTCN PAM
cccccaagggugcggagugu

SEQ ID NO: 28398 - RNA, 20 nt, Artificial Sequence
  HTT spacer sequence GTCN PAM
cgaaagcgugaauccguagc

SEQ ID NO: 28399 - RNA, 20 nt, Artificial Sequence
  HTT spacer sequence GTCN PAM
ugagagggagcccugcggau

SEQ ID NO: 28400 - RNA, 20 nt, Artificial Sequence
  HTT spacer sequence GTCN PAM
ccagcucggaggcccacgaa

SEQ ID NO: 28401 - RNA, 20 nt, Artificial Sequence
  HTT spacer sequence GTCN PAM
augaaaucaacgugaaaaaa

SEQ ID NO: 28402 - RNA, 20 nt, Artificial Sequence
  HTT spacer sequence GTCN PAM
uucacauggugauugcugaa

SEQ ID NO: 28403 - RNA, 20 nt, Artificial Sequence
  HTT spacer sequence GTCN PAM
gccgcuucgaauccuguucc

SEQ ID NO: 28404 - RNA, 20 nt, Artificial Sequence
  HTT spacer sequence GTCN PAM
cccuucuucaucacuggaac

SEQ ID NO: 28405 - RNA, 20 nt, Artificial Sequence
  HTT spacer sequence GTCN PAM
uggaggaaaugcagucuggu

SEQ ID NO: 28406 - RNA, 20 nt, Artificial Sequence
  HTT spacer sequence GTCN PAM
gguggaauuuucaauaugau

SEQ ID NO: 28407 - RNA, 20 nt, Artificial Sequence
  HTT spacer sequence GTCN PAM
gccgcaacucgauuugaugu

SEQ ID NO: 28408 - RNA, 20 nt, Artificial Sequence
  HTT spacer sequence GTCN PAM
aacaucaaaucgaguugcgg

SEQ ID NO: 28409 - RNA, 20 nt, Artificial Sequence
  HTT spacer sequence GTCN PAM
aaugcugaaaaccgaaucau

SEQ ID NO: 28410 - RNA, 20 nt, Artificial Sequence
  HTT spacer sequence GTCN PAM
ugacgauuuugcauuggaug

SEQ ID NO: 28411 - RNA, 20 nt, Artificial Sequence
  HTT spacer sequence GTCN PAM
ugacuuucuaguccaaugcu

SEQ ID NO: 28412 - RNA, 20 nt, Artificial Sequence
  HTT spacer sequence GTCN PAM
gacagcuugcaagccauccg

SEQ ID NO: 28413 - RNA, 20 nt, Artificial Sequence
  HTT spacer sequence GTCN PAM
gacuccagguuggagcucgu

SEQ ID NO: 28414 - RNA, 20 nt, Artificial Sequence
  HTT spacer sequence GTCN PAM
ccagcgaguggauuuucugc

SEQ ID NO: 28415 - RNA, 20 nt, Artificial Sequence
  HTT spacer sequence GTCN PAM
ugcaugaucuucauggucac

SEQ ID NO: 28416 - RNA, 20 nt, Artificial Sequence
  HTT spacer sequence GTCN PAM
gugcucagcugcacacaguc

SEQ ID NO: 28417 - RNA, 20 nt, Artificial Sequence
  HTT spacer sequence GTCN PAM
uggccgaguacccggccgag

SEQ ID NO: 28418 - RNA, 20 nt, Artificial Sequence
  HTT spacer sequence GTCN PAM
gggcacacggcgcugaaggc

SEQ ID NO: 28419 - RNA, 20 nt, Artificial Sequence
  HTT spacer sequence GTCN PAM
uccgggcacacggcgcugaa

SEQ ID NO: 28420 - RNA, 20 nt, Artificial Sequence
  HTT spacer sequence GTCN PAM
gcaugguaaccaacccgaaa

SEQ ID NO: 28421 - RNA, 20 nt, Artificial Sequence
  HTT spacer sequence GTCN PAM
uucgucugcaugguaaccaa

SEQ ID NO: 28422 - RNA, 20 nt, Artificial Sequence
  HTT spacer sequence GTCN PAM
ucauucgucugcaugguaac

SEQ ID NO: 28423 - RNA, 20 nt, Artificial Sequence
  HTT spacer sequence GTCN PAM
gcagggcgcccuccuccucc

SEQ ID NO: 28424 - RNA, 20 nt, Artificial Sequence
  HTT spacer sequence GTCN PAM
accaugaacacguggcagga

SEQ ID NO: 28425 - RNA, 20 nt, Artificial Sequence
  HTT spacer sequence GTCN PAM
ggguccaccaugaacacgug

SEQ ID NO: 28426 - RNA, 20 nt, Artificial Sequence
  HTT spacer sequence GTCN PAM
gccgugcacucaaacccaaa

SEQ ID NO: 28427 - RNA, 20 nt, Artificial Sequence
  HTT spacer sequence GTCN PAM
gggucggccgugcacucaaa

SEQ ID NO: 28428 - RNA, 20 nt, Artificial Sequence
  HTT spacer sequence GTCN PAM
ggaauucccggcguccuccc

SEQ ID NO: 28429 - RNA, 20 nt, Artificial Sequence
  HTT spacer sequence GTCN PAM
ucccuccccguccugcaguu

SEQ ID NO: 28430 - RNA, 20 nt, Artificial Sequence
  HTT spacer sequence GTCN PAM
ugcaguucaucucuguccug

SEQ ID NO: 28431 - RNA, 20 nt, Artificial Sequence
  HTT spacer sequence GTCN PAM
uguaccgagacaugggugag

SEQ ID NO: 28432 - RNA, 20 nt, Artificial Sequence
  HTT spacer sequence GTCN PAM
cgguacaggacagagaugaa

SEQ ID NO: 28433 - RNA, 20 nt, Artificial Sequence
  HTT spacer sequence GTCN PAM
agaaaggcgcgggcccgcau

SEQ ID NO: 28434 - RNA, 20 nt, Artificial Sequence
  HTT spacer sequence GTCN PAM
ccguccagaaaggcgcgggc

SEQ ID NO: 28435 - RNA, 20 nt, Artificial Sequence
  HTT spacer sequence GTCN PAM
cuguugcugcuggugcuguu

SEQ ID NO: 28436 - RNA, 20 nt, Artificial Sequence
  HTT spacer sequence GTCN PAM
uugugguggaccuggguggg

SEQ ID NO: 28437 - RNA, 20 nt, Artificial Sequence
  HTT spacer sequence GTCN PAM
accacaaggacccgguugcu

SEQ ID NO: 28438 - RNA, 20 nt, Artificial Sequence
  HTT spacer sequence GTCN PAM
gcucgagcucccacccaggu

SEQ ID NO: 28439 - RNA, 20 nt, Artificial Sequence
  HTT spacer sequence GTCN PAM
cacgcgcugccuccggggcc

SEQ ID NO: 28440 - RNA, 20 nt, Artificial Sequence
  HTT spacer sequence GTCN PAM
agggagcaccccagggcugg

SEQ ID NO: 28441 - RNA, 20 nt, Artificial Sequence
  HTT spacer sequence GTCN PAM
ggaccccgaagggagccccc

SEQ ID NO: 28442 - RNA, 20 nt, Artificial Sequence
  HTT spacer sequence GTCN PAM
ggacagaagggcccagucca

SEQ ID NO: 28443 - RNA, 20 nt, Artificial Sequence
  HTT spacer sequence GTCN PAM
gaugagcggccucaaauggg

SEQ ID NO: 28444 - RNA, 20 nt, Artificial Sequence
  HTT spacer sequence GTCN PAM
gucugaugagcggccucaaa

SEQ ID NO: 28445 - RNA, 20 nt, Artificial Sequence
  HTT spacer sequence GTCN PAM
cagaaccugucagucugaug

SEQ ID NO: 28446 - RNA, 20 nt, Artificial Sequence
  HTT spacer sequence GTCN PAM
ccccuuccaagaggggcacc

SEQ ID NO: 28447 - RNA, 20 nt, Artificial Sequence
  HTT spacer sequence GTCN PAM
acgugcuccgggaguggcag

SEQ ID NO: 28448 - RNA, 20 nt, Artificial Sequence
  HTT spacer sequence GTCN PAM
gcacugccacucccggagca

SEQ ID NO: 28449 - RNA, 20 nt, Artificial Sequence
  HTT spacer sequence GTCN PAM
cugguguguccgcacugcca

SEQ ID NO: 28450 - RNA, 20 nt, Artificial Sequence
  HTT spacer sequence GTCN PAM
uggucgcugguguguccgca

SEQ ID NO: 28451 - RNA, 20 nt, Artificial Sequence
  HTT spacer sequence GTCN PAM
agcaucaacugcggcacacu

SEQ ID NO: 28452 - RNA, 20 nt, Artificial Sequence
  HTT spacer sequence GTCN PAM
gcggggaucuugcucauagg

SEQ ID NO: 28453 - RNA, 20 nt, Artificial Sequence
  HTT spacer sequence GTCN PAM
aggaaggccuuuggaaugca

SEQ ID NO: 28454 - RNA, 20 nt, Artificial Sequence
  HTT spacer sequence GTCN PAM
ccaucgaaauguucgaaaga

SEQ ID NO: 28455 - RNA, 20 nt, Artificial Sequence
  HTT spacer sequence GTCN PAM
uucgaacauuucgaugggga

SEQ ID NO: 28456 - RNA, 20 nt, Artificial Sequence
  HTT spacer sequence GTCN PAM
agcaggaggcggugcugcca

SEQ ID NO: 28457 - RNA, 20 nt, Artificial Sequence
  HTT spacer sequence GTCN PAM
uuccagaggguucccugcac

SEQ ID NO: 28458 - RNA, 20 nt, Artificial Sequence
  HTT spacer sequence GTCN PAM
uuacaucguaaacagccgga

SEQ ID NO: 28459 - RNA, 20 nt, Artificial Sequence
  HTT spacer sequence GTCN PAM
caggaugugaacaaacacua

SEQ ID NO: 28460 - RNA, 20 nt, Artificial Sequence
  HTT spacer sequence GTCN PAM
ucuuaggauggucucaggau

SEQ ID NO: 28461 - RNA, 20 nt, Artificial Sequence
  HTT spacer sequence GTCN PAM
gaucccauagccuccccagu

SEQ ID NO: 28462 - RNA, 20 nt, Artificial Sequence
  HTT spacer sequence GTCN PAM
ugaggcggccacaagauggg

SEQ ID NO: 28463 - RNA, 20 nt, Artificial Sequence
  HTT spacer sequence GTCN PAM
ggacgucgccguggacaggu

SEQ ID NO: 28464 - RNA, 20 nt, Artificial Sequence
  HTT spacer sequence GTCN PAM
ggacccaucuuguggccgcc

SEQ ID NO: 28465 - RNA, 20 nt, Artificial Sequence
  HTT spacer sequence GTCN PAM
ccguggacaggucugcagag

SEQ ID NO: 28466 - RNA, 20 nt, Artificial Sequence
  HTT spacer sequence GTCN PAM
gcuucucccuccucugggga

SEQ ID NO: 28467 - RNA, 20 nt, Artificial Sequence
  HTT spacer sequence GTCN PAM
acaaguaacucagcuccccu

SEQ ID NO: 28468 - RNA, 20 nt, Artificial Sequence
  HTT spacer sequence GTCN PAM
ccaguugauggcaaccuuag

SEQ ID NO: 28469 - RNA, 20 nt, Artificial Sequence
  HTT spacer sequence GTCN PAM
aagguugccaucaacugggg

SEQ ID NO: 28470 - RNA, 20 nt, Artificial Sequence
  HTT spacer sequence GTCN PAM
cagagcuagcuuucccagcg

SEQ ID NO: 28471 - RNA, 20 nt, Artificial Sequence
  HTT spacer sequence GTCN PAM
uaucuguugucgugggucuu

SEQ ID NO: 28472 - RNA, 20 nt, Artificial Sequence
  HTT spacer sequence GTCN PAM
ugggucuugauagcuuccac

SEQ ID NO: 28473 - RNA, 20 nt, Artificial Sequence
  HTT spacer sequence GTCN PAM
ugauagcuuccaccagcuua

SEQ ID NO: 28474 - RNA, 20 nt, Artificial Sequence
  HTT spacer sequence GTCN PAM
uccaaguuaaccugugugaa

SEQ ID NO: 28475 - RNA, 20 nt, Artificial Sequence
  HTT spacer sequence GTCN PAM
ccuucacacagguuaacuug

SEQ ID NO: 28476 - RNA, 20 nt, Artificial Sequence
  HTT spacer sequence GTCN PAM
gcuccacugucgccuucaca

SEQ ID NO: 28477 - RNA, 20 nt, Artificial Sequence
  HTT spacer sequence GTCN PAM
ugcgggcuugacgcccucgu

SEQ ID NO: 28478 - RNA, 20 nt, Artificial Sequence
  HTT spacer sequence GTCN PAM
agcccgcaggaccaacgagu

SEQ ID NO: 28479 - RNA, 20 nt, Artificial Sequence
  HTT spacer sequence GTCN PAM
ggccuucccuugacagugcg

SEQ ID NO: 28480 - RNA, 20 nt, Artificial Sequence
  HTT spacer sequence GTCN PAM
agggaaggccugacgagggc

SEQ ID NO: 28481 - RNA, 20 nt, Artificial Sequence
  HTT spacer sequence GTCN PAM
ggaacccccaucucaggacg

SEQ ID NO: 28482 - RNA, 20 nt, Artificial Sequence
  HTT spacer sequence GTCN PAM
ugagauggggguucccgacc

SEQ ID NO: 28483 - RNA, 20 nt, Artificial Sequence
  HTT spacer sequence GTCN PAM
uccugccugccugcguccug

SEQ ID NO: 28484 - RNA, 20 nt, Artificial Sequence
  HTT spacer sequence GTCN PAM
cgugcgaucaccacccgcug

SEQ ID NO: 28485 - RNA, 20 nt, Artificial Sequence
  HTT spacer sequence GTCN PAM
caaccuugguggagaacgag

SEQ ID NO: 28486 - RNA, 20 nt, Artificial Sequence
  HTT spacer sequence GTCN PAM
uuccagcagggguugauacu

SEQ ID NO: 28487 - RNA, 20 nt, Artificial Sequence
  HTT spacer sequence GTCN PAM
aucucuuaguggggaugucc

SEQ ID NO: 28488 - RNA, 20 nt, Artificial Sequence
  HTT spacer sequence GTCN PAM
ccugugccagugcugucuuu

SEQ ID NO: 28489 - RNA, 20 nt, Artificial Sequence
  HTT spacer sequence GTCN PAM
uuuaguccaggccaacaguc

SEQ ID NO: 28490 - RNA, 20 nt, Artificial Sequence
  HTT spacer sequence GTCN PAM
aggccaacagucucugcuuc

SEQ ID NO: 28491 - RNA, 20 nt, Artificial Sequence
  HTT spacer sequence GTCN PAM
cugcuucuucucuugcuugu

SEQ ID NO: 28492 - RNA, 20 nt, Artificial Sequence
  HTT spacer sequence GTCN PAM
cugguugguacugugggcca

SEQ ID NO: 28493 - RNA, 20 nt, Artificial Sequence
  HTT spacer sequence GTCN PAM
aucacaggaggugcuuucag

SEQ ID NO: 28494 - RNA, 20 nt, Artificial Sequence
  HTT spacer sequence GTCN PAM
agggcccugcuguaucaggc

SEQ ID NO: 28495 - RNA, 20 nt, Artificial Sequence
  HTT spacer sequence GTCN PAM
cuguaauggcuggacguccu

SEQ ID NO: 28496 - RNA, 20 nt, Artificial Sequence
  HTT spacer sequence GTCN PAM
agccauuacagggaccuugc

SEQ ID NO: 28497 - RNA, 20 nt, Artificial Sequence
  HTT spacer sequence GTCN PAM
uguccacugcagaaauucuu

SEQ ID NO: 28498 - RNA, 20 nt, Artificial Sequence
  HTT spacer sequence GTCN PAM
acugcagaaauucuuagggc

SEQ ID NO: 28499 - RNA, 20 nt, Artificial Sequence
  HTT spacer sequence GTCN PAM
gaggaaagcccuaagaauuu

SEQ ID NO: 28500 - RNA, 20 nt, Artificial Sequence
  HTT spacer sequence GTCN PAM
aucuucuuggccaucugcug

SEQ ID NO: 28501 - RNA, 20 nt, Artificial Sequence
  HTT spacer sequence GTCN PAM
aauagagagugggaauuuuc

SEQ ID NO: 28502 - RNA, 20 nt, Artificial Sequence
  HTT spacer sequence GTCN PAM
guuugcuaguauuuuguuga

SEQ ID NO: 28503 - RNA, 20 nt, Artificial Sequence
  HTT spacer sequence GTCN PAM
uagccagagcagucaggcaa

SEQ ID NO: 28504 - RNA, 20 nt, Artificial Sequence
  HTT spacer sequence GTCN PAM
ggcaagaggaauaaauaaaa

SEQ ID NO: 28505 - RNA, 20 nt, Artificial Sequence
  HTT spacer sequence GTCN PAM
aauuaucgugguuugcugau

SEQ ID NO: 28506 - RNA, 20 nt, Artificial Sequence
  HTT spacer sequence GTCN PAM
cccaggcuggagcacagugc

SEQ ID NO: 28507 - RNA, 20 nt, Artificial Sequence
  HTT spacer sequence GTCN PAM
cuguaaccucaaacucuugg

SEQ ID NO: 28508 - RNA, 20 nt, Artificial Sequence
  HTT spacer sequence GTCN PAM
aagaguuugagguuacagug

SEQ ID NO: 28509 - RNA, 20 nt, Artificial Sequence
  HTT spacer sequence GTCN PAM
cuuuaaugauauuaauuauu

SEQ ID NO: 28510 - RNA, 20 nt, Artificial Sequence
  HTT spacer sequence GTCN PAM
gaagcaaucuacauauucaa

SEQ ID NO: 28511 - RNA, 20 nt, Artificial Sequence
  HTT spacer sequence GTCN PAM
gguaauguaauaucuccagc

SEQ ID NO: 28512 - RNA, 20 nt, Artificial Sequence
  HTT spacer sequence GTCN PAM
aguuuuauaccaguaacaug

SEQ ID NO: 28513 - RNA, 20 nt, Artificial Sequence
  HTT spacer sequence GTCN PAM
ggccagguaacagaucccag

SEQ ID NO: 28514 - RNA, 20 nt, Artificial Sequence
  HTT spacer sequence GTCN PAM
acuaaccauguccagucugg

SEQ ID NO: 28515 - RNA, 20 nt, Artificial Sequence
  HTT spacer sequence GTCN PAM
agucuggaugggaggucaca

SEQ ID NO: 28516 - RNA, 20 nt, Artificial Sequence
  HTT spacer sequence GTCN PAM
ggaugggaggucacaggguc

SEQ ID NO: 28517 - RNA, 20 nt, Artificial Sequence
  HTT spacer sequence GTCN PAM
cagggucaccuuuaacucca

SEQ ID NO: 28518 - RNA, 20 nt, Artificial Sequence
  HTT spacer sequence GTCN PAM
ccuuuaacuccaaggggaag

SEQ ID NO: 28519 - RNA, 20 nt, Artificial Sequence
  HTT spacer sequence GTCN PAM
gugucuuauuuaauacauuu

SEQ ID NO: 28520 - RNA, 20 nt, Artificial Sequence
  HTT spacer sequence GTCN PAM
uauuuaauacauuuauuacu

SEQ ID NO: 28521 - RNA, 20 nt, Artificial Sequence
  HTT spacer sequence GTCN PAM
aaacagauuuucucccuuuu

SEQ ID NO: 28522 - RNA, 20 nt, Artificial Sequence
  HTT spacer sequence GTCN PAM
auuauuugaaaaucaaucau

SEQ ID NO: 28523 - RNA, 20 nt, Artificial Sequence
  HTT spacer sequence GTCN PAM
guguuugagugagacuaucu

SEQ ID NO: 28524 - RNA, 20 nt, Artificial Sequence
  HTT spacer sequence GTCN PAM
cacucaaacacagacuuuaa

SEQ ID NO: 28525 - RNA, 20 nt, Artificial Sequence
  HTT spacer sequence GTCN PAM
cacaaaacaaaaaauuaaug

SEQ ID NO: 28526 - RNA, 20 nt, Artificial Sequence
  HTT spacer sequence GTCN PAM
auuauuaaucuggugaaagc

SEQ ID NO: 28527 - RNA, 20 nt, Artificial Sequence
  HTT spacer sequence GTCN PAM
gaacaaucugccacuuauag

SEQ ID NO: 28528 - RNA, 20 nt, Artificial Sequence
  HTT spacer sequence GTCN PAM
cugauguguugggugacugg

SEQ ID NO: 28529 - RNA, 20 nt, Artificial Sequence
  HTT spacer sequence GTCN PAM
cccaacacaucagugacccg

SEQ ID NO: 28530 - RNA, 20 nt, Artificial Sequence
  HTT spacer sequence GTCN PAM
uggcucugggauauuacugc

SEQ ID NO: 28531 - RNA, 20 nt, Artificial Sequence
  HTT spacer sequence GTCN PAM
auugcuugggacaucauagg

SEQ ID NO: 28532 - RNA, 20 nt, Artificial Sequence
  HTT spacer sequence GTCN PAM
caagcaauugacuaggacua

SEQ ID NO: 28533 - RNA, 20 nt, Artificial Sequence
  HTT spacer sequence GTCN PAM
uuucauguguaauauucauc

SEQ ID NO: 28534 - RNA, 20 nt, Artificial Sequence
  HTT spacer sequence GTCN PAM
caaucuaaauaauaucacag

SEQ ID NO: 28535 - RNA, 20 nt, Artificial Sequence
  HTT spacer sequence GTCN PAM
uuccuuccaugcccgcaaua

SEQ ID NO: 28536 - RNA, 20 nt, Artificial Sequence
  HTT spacer sequence GTCN PAM
gcaucugugacguggcugcc

SEQ ID NO: 28537 - RNA, 20 nt, Artificial Sequence
  HTT spacer sequence GTCN PAM
cagaugcugacauacacauu

SEQ ID NO: 28538 - RNA, 20 nt, Artificial Sequence
  HTT spacer sequence GTCN PAM
ucucauuggccaggaagggg

SEQ ID NO: 28539 - RNA, 20 nt, Artificial Sequence
  HTT spacer sequence GTCN PAM
ugccccccaacccacuuccc

SEQ ID NO: 28540 - RNA, 20 nt, Artificial Sequence
  HTT spacer sequence GTCN PAM
cacacagugccugucagggg

SEQ ID NO: 28541 - RNA, 20 nt, Artificial Sequence
  HTT spacer sequence GTCN PAM
gggggcuuacuuugggugcc

SEQ ID NO: 28542 - RNA, 20 nt, Artificial Sequence
  HTT spacer sequence GTCN PAM
ucuggcacccaaaguaagcc

SEQ ID NO: 28543 - RNA, 20 nt, Artificial Sequence
  HTT spacer sequence GTCN PAM
guccucuggcacccaaagua

SEQ ID NO: 28544 - RNA, 20 nt, Artificial Sequence
  HTT spacer sequence GTCN PAM
cagggccagggcuggcagug

SEQ ID NO: 28545 - RNA, 20 nt, Artificial Sequence
  HTT spacer sequence GTCN PAM
acugccagcccuggcccugc

SEQ ID NO: 28546 - RNA, 20 nt, Artificial Sequence
  HTT spacer sequence GTCN PAM
gggcaugguugcccuugccg

SEQ ID NO: 28547 - RNA, 20 nt, Artificial Sequence
  HTT spacer sequence GTCN PAM
gacaggaugugcagaauucc

SEQ ID NO: 28548 - RNA, 20 nt, Artificial Sequence
  HTT spacer sequence GTCN PAM
gaccaccccaaccucggcac

SEQ ID NO: 28549 - RNA, 20 nt, Artificial Sequence
  HTT spacer sequence GTCN PAM
cggagggccacacgguaggg

SEQ ID NO: 28550 - RNA, 20 nt, Artificial Sequence
  HTT spacer sequence GTCN PAM
ccucccccuugggagguucc

SEQ ID NO: 28551 - RNA, 20 nt, Artificial Sequence
  HTT spacer sequence GTCN PAM
aaacaagugaggcccagagg

SEQ ID NO: 28552 - RNA, 20 nt, Artificial Sequence
  HTT spacer sequence GTCN PAM
uaaagccccagugaccucca

SEQ ID NO: 28553 - RNA, 20 nt, Artificial Sequence
  HTT spacer sequence GTCN PAM
cuggggcuuuaagacccccc

SEQ ID NO: 28554 - RNA, 20 nt, Artificial Sequence
  HTT spacer sequence GTCN PAM
uccucucugccaaggcgagg

SEQ ID NO: 28555 - RNA, 20 nt, Artificial Sequence
  HTT spacer sequence GTCN PAM
uugccaggccgucugggagg

SEQ ID NO: 28556 - RNA, 20 nt, Artificial Sequence
  HTT spacer sequence GTCN PAM
gggagguccccgcaggaagg

SEQ ID NO: 28557 - RNA, 20 nt, Artificial Sequence
  HTT spacer sequence GTCN PAM
ccgcaggaagggguuccugc

SEQ ID NO: 28558 - RNA, 20 nt, Artificial Sequence
  HTT spacer sequence GTCN PAM
agccucuggagcuccauucu

SEQ ID NO: 28559 - RNA, 20 nt, Artificial Sequence
  HTT spacer sequence GTCN PAM
ccuggugagccagccucuuc

SEQ ID NO: 28560 - RNA, 20 nt, Artificial Sequence
  HTT spacer sequence GTCN PAM
ugggcuugucccguaccugc

SEQ ID NO: 28561 - RNA, 20 nt, Artificial Sequence
  HTT spacer sequence GTCN PAM
cguaccugccugacggcucu

SEQ ID NO: 28562 - RNA, 20 nt, Artificial Sequence
  HTT spacer sequence GTCN PAM
ggcagguacgggacaagccc

SEQ ID NO: 28563 - RNA, 20 nt, Artificial Sequence
  HTT spacer sequence GTCN PAM
cccugaucagggcucccguu

SEQ ID NO: 28564 - RNA, 20 nt, Artificial Sequence
  HTT spacer sequence GTCN PAM
gcugagccaggaggaagccg

SEQ ID NO: 28565 - RNA, 20 nt, Artificial Sequence
  HTT spacer sequence GTCN PAM
cgaguucucggccuccuccu

SEQ ID NO: 28566 - RNA, 20 nt, Artificial Sequence
  HTT spacer sequence GTCN PAM
cgcuggccuuccgguaccgc

SEQ ID NO: 28567 - RNA, 20 nt, Artificial Sequence
  HTT spacer sequence GTCN PAM
aguuaugaaggagggguggc

SEQ ID NO: 28568 - RNA, 20 nt, Artificial Sequence
  HTT spacer sequence GTCN PAM
guucuugucccuggugccuu

SEQ ID NO: 28569 - RNA, 20 nt, Artificial Sequence
  HTT spacer sequence GTCN PAM
cuggugccuuuaagccagcc

SEQ ID NO: 28570 - RNA, 20 nt, Artificial Sequence
  HTT spacer sequence GTCN PAM
ccccaacccuccugcuggug

SEQ ID NO: 28571 - RNA, 20 nt, Artificial Sequence
  HTT spacer sequence GTCN PAM
agcccagagccaagccccgg

SEQ ID NO: 28572 - RNA, 20 nt, Artificial Sequence
  HTT spacer sequence GTCN PAM
uugcgccucucuaggccccg

SEQ ID NO: 28573 - RNA, 20 nt, Artificial Sequence
  HTT spacer sequence GTCN PAM
uggcacacaggcacugagug

SEQ ID NO: 28574 - RNA, 20 nt, Artificial Sequence
  HTT spacer sequence GTCN PAM
acucagugccugugugccau

SEQ ID NO: 28575 - RNA, 20 nt, Artificial Sequence
  HTT spacer sequence GTCN PAM
uggguggcgucacggcacgu

SEQ ID NO: 28576 - RNA, 20 nt, Artificial Sequence
  HTT spacer sequence GTCN PAM
cggcacgugggcacugagug

SEQ ID NO: 28577 - RNA, 20 nt, Artificial Sequence
  HTT spacer sequence GTCN PAM
cuuacagggcaugaugcuac

SEQ ID NO: 28578 - RNA, 20 nt, Artificial Sequence
  HTT spacer sequence GTCN PAM
augaaaccaacuucacaaac

SEQ ID NO: 28579 - RNA, 20 nt, Artificial Sequence
  HTT spacer sequence GTCN PAM
uaguaacagcgucaaugaaa

SEQ ID NO: 28580 - RNA, 20 nt, Artificial Sequence
  HTT spacer sequence GTCN PAM
gacauguugggaucuguucu

SEQ ID NO: 28581 - RNA, 20 nt, Artificial Sequence
  HTT spacer sequence GTCN PAM
gacauuacagucuuaguaac

SEQ ID NO: 28582 - RNA, 20 nt, Artificial Sequence
  HTT spacer sequence GTCN PAM
uccuuuucaugugaaaagaa

SEQ ID NO: 28583 - RNA, 20 nt, Artificial Sequence
  HTT spacer sequence GTCN PAM
ccuaguuugggcggaguggg

SEQ ID NO: 28584 - RNA, 20 nt, Artificial Sequence
  HTT spacer sequence GTCN PAM
cggcucccacuccgcccaaa

SEQ ID NO: 28585 - RNA, 20 nt, Artificial Sequence
  HTT spacer sequence GTCN PAM
agagucacggcucccacucc

SEQ ID NO: 28586 - RNA, 20 nt, Artificial Sequence
  HTT spacer sequence GTCN PAM
ggcuuucccgggacaccucc

SEQ ID NO: 28587 - RNA, 20 nt, Artificial Sequence
  HTT spacer sequence GTCN PAM
cgggaaagccagacggccca

SEQ ID NO: 28588 - RNA, 20 nt, Artificial Sequence
  HTT spacer sequence GTCN PAM
gccccuuguguuccucagau

SEQ ID NO: 28589 - RNA, 20 nt, Artificial Sequence
  HTT spacer sequence GTCN PAM
aucugaggaacacaaggggc

SEQ ID NO: 28590 - RNA, 20 nt, Artificial Sequence
  HTT spacer sequence GTCN PAM
ugaggcuuaauuaacucaug

SEQ ID NO: 28591 - RNA, 20 nt, Artificial Sequence
  HTT spacer sequence GTCN PAM
cucucucuuuucuuucaguc

SEQ ID NO: 28592 - RNA, 20 nt, Artificial Sequence
  HTT spacer sequence GTCN PAM
gcaacugugucugauggcgg

SEQ ID NO: 28593 - RNA, 20 nt, Artificial Sequence
  HTT spacer sequence GTCN PAM
gauggcgguaagucacaauu

SEQ ID NO: 28594 - RNA, 20 nt, Artificial Sequence
  HTT spacer sequence GTCN PAM
caauuucugauguauauauu

SEQ ID NO: 28595 - RNA, 20 nt, Artificial Sequence
  HTT spacer sequence GTCN PAM
uuccugagggcaucaaaugg

SEQ ID NO: 28596 - RNA, 20 nt, Artificial Sequence
  HTT spacer sequence GTCN PAM
ccuugugggcggguucuagg

SEQ ID NO: 28597 - RNA, 20 nt, Artificial Sequence
  HTT spacer sequence GTCN PAM
cagaaagcgcccccagaauu

SEQ ID NO: 28598 - RNA, 20 nt, Artificial Sequence
  HTT spacer sequence GTCN PAM
gaggagugcacccacccgcc

SEQ ID NO: 28599 - RNA, 20 nt, Artificial Sequence
  HTT spacer sequence GTCN PAM
gacaaguuaaaacguguuuu

SEQ ID NO: 28600 - RNA, 20 nt, Artificial Sequence
  HTT spacer sequence GTCN PAM
gacacaggcaggcggguggg

SEQ ID NO: 28601 - RNA, 20 nt, Artificial Sequence
  HTT spacer sequence GTCN PAM
cacccaaauuuccugaauug

SEQ ID NO: 28602 - RNA, 20 nt, Artificial Sequence
  HTT spacer sequence GTCN PAM
auuauacuuuucuugagaaa

SEQ ID NO: 28603 - RNA, 20 nt, Artificial Sequence
  HTT spacer sequence GTCN PAM
augaaaagaaucccugugca

SEQ ID NO: 28604 - RNA, 20 nt, Artificial Sequence
  HTT spacer sequence GTCN PAM
uauuucacugaagauuucuc

SEQ ID NO: 28605 - RNA, 20 nt, Artificial Sequence
  HTT spacer sequence GTCN PAM
uccuuaucauuuugguucaa

SEQ ID NO: 28606 - RNA, 20 nt, Artificial Sequence
  HTT spacer sequence GTCN PAM
ggaguguuagaagaaaagag

SEQ ID NO: 28607 - RNA, 20 nt, Artificial Sequence
  HTT spacer sequence GTCN PAM
gcaggcucucggguuucauc

SEQ ID NO: 28608 - RNA, 20 nt, Artificial Sequence
  HTT spacer sequence GTCN PAM
ccucacgcuuuuguccccac

SEQ ID NO: 28609 - RNA, 20 nt, Artificial Sequence
  HTT spacer sequence GTCN PAM
ccacuucugucccugagagc

SEQ ID NO: 28610 - RNA, 20 nt, Artificial Sequence
  HTT spacer sequence GTCN PAM
cugagagcuggaauaggugc

SEQ ID NO: 28611 - RNA, 20 nt, Artificial Sequence
  HTT spacer sequence GTCN PAM
uucucucacuuucugugguc

SEQ ID NO: 28612 - RNA, 20 nt, Artificial Sequence
  HTT spacer sequence GTCN PAM
ugcagcugcuggccucaguc

SEQ ID NO: 28613 - RNA, 20 nt, Artificial Sequence
  HTT spacer sequence GTCN PAM
ucggccucggaaagggcugc

SEQ ID NO: 28614 - RNA, 20 nt, Artificial Sequence
  HTT spacer sequence GTCN PAM
ccagguaggcagacagagcu

SEQ ID NO: 28615 - RNA, 20 nt, Artificial Sequence
  HTT spacer sequence GTCN PAM
gccuaccuggggacagcagc

SEQ ID NO: 28616 - RNA, 20 nt, Artificial Sequence
  HTT spacer sequence GTCN PAM
uccuggccuuccuacagagu

SEQ ID NO: 28617 - RNA, 20 nt, Artificial Sequence
  HTT spacer sequence GTCN PAM
gcccaccugggguccuccug

SEQ ID NO: 28618 - RNA, 20 nt, Artificial Sequence
  HTT spacer sequence GTCN PAM
cggcuucaggugccagugcg

SEQ ID NO: 28619 - RNA, 20 nt, Artificial Sequence
  HTT spacer sequence GTCN PAM
ggaucccucuggucucggcu

SEQ ID NO: 28620 - RNA, 20 nt, Artificial Sequence
  HTT spacer sequence GTCN PAM
uuuaaucagucuuaaggugg

SEQ ID NO: 28621 - RNA, 20 nt, Artificial Sequence
  HTT spacer sequence GTCN PAM
uaagguggagggaggauaaa

SEQ ID NO: 28622 - RNA, 20 nt, Artificial Sequence
  HTT spacer sequence GTCN PAM
uguuucuuuucauuaaggaa

SEQ ID NO: 28623 - RNA, 20 nt, Artificial Sequence
  HTT spacer sequence GTCN PAM
cuuuauccuggauuugguuc

SEQ ID NO: 28624 - RNA, 20 nt, Artificial Sequence
  HTT spacer sequence GTCN PAM
ucugccagaaaggagaagug

SEQ ID NO: 28625 - RNA, 20 nt, Artificial Sequence
  HTT spacer sequence GTCN PAM
gcaauagaugcaggaaccca

SEQ ID NO: 28626 - RNA, 20 nt, Artificial Sequence
  HTT spacer sequence GTCN PAM
auuuuacaguuguuuaaaaa

SEQ ID NO: 28627 - RNA, 20 nt, Artificial Sequence
  HTT spacer sequence GTCN PAM
cuagcuccucgccgugcugg

SEQ ID NO: 28628 - RNA, 20 nt, Artificial Sequence
  HTT spacer sequence GTCN PAM
cucugaggaaguguguccug

SEQ ID NO: 28629 - RNA, 20 nt, Artificial Sequence
  HTT spacer sequence GTCN PAM
uggcuccucgccacgcuggc

SEQ ID NO: 28630 - RNA, 20 nt, Artificial Sequence
  HTT spacer sequence GTCN PAM
cucugaggaaguguauccug

SEQ ID NO: 28631 - RNA, 20 nt, Artificial Sequence
  HTT spacer sequence GTCN PAM
gacccuggggccacugggac

SEQ ID NO: 28632 - RNA, 20 nt, Artificial Sequence
  HTT spacer sequence GTCN PAM
gacacugggaaaagaaggag

SEQ ID NO: 28633 - RNA, 20 nt, Artificial Sequence
  HTT spacer sequence GTCN PAM
caguggccccagggucugac

SEQ ID NO: 28634 - RNA, 20 nt, Artificial Sequence
  HTT spacer sequence GTCN PAM
cuccauggagagccccaguc

SEQ ID NO: 28635 - RNA, 20 nt, Artificial Sequence
  HTT spacer sequence GTCN PAM
cagaggaggagacgggaggg

SEQ ID NO: 28636 - RNA, 20 nt, Artificial Sequence
  HTT spacer sequence GTCN PAM
ccuccucugugacuggggcu

SEQ ID NO: 28637 - RNA, 20 nt, Artificial Sequence
  HTT spacer sequence GTCN PAM
ccuccucccucccgucuccu

SEQ ID NO: 28638 - RNA, 20 nt, Artificial Sequence
  HTT spacer sequence GTCN PAM
ccuccucccucccgucuccu

SEQ ID NO: 28639 - RNA, 20 nt, Artificial Sequence
  HTT spacer sequence GTCN PAM
ccuccucccucccgucuccu

SEQ ID NO: 28640 - RNA, 20 nt, Artificial Sequence
  HTT spacer sequence GTCN PAM
ccucccucccgucuccuccu

SEQ ID NO: 28641 - RNA, 20 nt, Artificial Sequence
  HTT spacer sequence GTCN PAM
ucagcacacccugaauuuca

SEQ ID NO: 28642 - RNA, 20 nt, Artificial Sequence
  HTT spacer sequence GTCN PAM
cauucugccguuguuagaug

SEQ ID NO: 28643 - RNA, 20 nt, Artificial Sequence
  HTT spacer sequence GTCN PAM
gcaggugagauggccagacu

SEQ ID NO: 28644 - RNA, 20 nt, Artificial Sequence
  HTT spacer sequence GTCN PAM
ggccaucucaccugcagacu

SEQ ID NO: 28645 - RNA, 20 nt, Artificial Sequence
  HTT spacer sequence GTCN PAM
uggagagucccccgcuccag

SEQ ID NO: 28646 - RNA, 20 nt, Artificial Sequence
  HTT spacer sequence GTCN PAM
cccgcuccagcccuggaccc

SEQ ID NO: 28647 - RNA, 20 nt, Artificial Sequence
  HTT spacer sequence GTCN PAM
agggcuggagcgggggacuc

SEQ ID NO: 28648 - RNA, 20 nt, Artificial Sequence
  HTT spacer sequence GTCN PAM
cugccguggagggcagggug

SEQ ID NO: 28649 - RNA, 20 nt, Artificial Sequence
  HTT spacer sequence GTCN PAM
ggguggggggguggucccag

SEQ ID NO: 28650 - RNA, 20 nt, Artificial Sequence
  HTT spacer sequence GTCN PAM
cagggaaacucuggcugugu

SEQ ID NO: 28651 - RNA, 20 nt, Artificial Sequence
  HTT spacer sequence GTCN PAM
gugggagacucagugcacug

SEQ ID NO: 28652 - RNA, 20 nt, Artificial Sequence
  HTT spacer sequence GTCN PAM
cccacugaccacagccuaua

SEQ ID NO: 28653 - RNA, 20 nt, Artificial Sequence
  HTT spacer sequence GTCN PAM
cuccuuggaacucggggagc

SEQ ID NO: 28654 - RNA, 20 nt, Artificial Sequence
  HTT spacer sequence GTCN PAM
cugccuggucauccugucua

SEQ ID NO: 28655 - RNA, 20 nt, Artificial Sequence
  HTT spacer sequence GTCN PAM
uccugucuaguuuuggugau

SEQ ID NO: 28656 - RNA, 20 nt, Artificial Sequence
  HTT spacer sequence GTCN PAM
aguuuuggugauuaauagau

SEQ ID NO: 28657 - RNA, 20 nt, Artificial Sequence
  HTT spacer sequence GTCN PAM
cagaaugaaaccguggcaug

SEQ ID NO: 28658 - RNA, 20 nt, Artificial Sequence
  HTT spacer sequence GTCN PAM
aacuuccuuaaaaccgagcc

SEQ ID NO: 28659 - RNA, 20 nt, Artificial Sequence
  HTT spacer sequence GTCN PAM
aguuggaguguguuuuuuca

SEQ ID NO: 28660 - RNA, 20 nt, Artificial Sequence
  HTT spacer sequence GTCN PAM
cuggggggcacggcagggcu

SEQ ID NO: 28661 - RNA, 20 nt, Artificial Sequence
  HTT spacer sequence GTCN PAM
gccuugugggaaguuauuca

SEQ ID NO: 28662 - RNA, 20 nt, Artificial Sequence
  HTT spacer sequence GTCN PAM
gaauaacuucccacaaggca

SEQ ID NO: 28663 - RNA, 20 nt, Artificial Sequence
  HTT spacer sequence GTCN PAM
agcuggagggagauggggcg

SEQ ID NO: 28664 - RNA, 20 nt, Artificial Sequence
  HTT spacer sequence GTCN PAM
ggcucugcacagagcuggag

SEQ ID NO: 28665 - RNA, 20 nt, Artificial Sequence
  HTT spacer sequence GTCN PAM
agcucugugccaagaggccu

SEQ ID NO: 28666 - RNA, 20 nt, Artificial Sequence
  HTT spacer sequence GTCN PAM
cagcgggaacauccaccugu

SEQ ID NO: 28667 - RNA, 20 nt, Artificial Sequence
  HTT spacer sequence GTCN PAM
ggguguggagacuaucgggg

SEQ ID NO: 28668 - RNA, 20 nt, Artificial Sequence
  HTT spacer sequence GTCN PAM
ccacaccccgacuucagaag

SEQ ID NO: 28669 - RNA, 20 nt, Artificial Sequence
  HTT spacer sequence GTCN PAM
gugccagcaggaaagccggg

SEQ ID NO: 28670 - RNA, 20 nt, Artificial Sequence
  HTT spacer sequence GTCN PAM
cccaaagccagagccgcaca

SEQ ID NO: 28671 - RNA, 20 nt, Artificial Sequence
  HTT spacer sequence GTCN PAM
acaugacaccccacauacau

SEQ ID NO: 28672 - RNA, 20 nt, Artificial Sequence
  HTT spacer sequence GTCN PAM
uguggaccugccaccguccc

SEQ ID NO: 28673 - RNA, 20 nt, Artificial Sequence
  HTT spacer sequence GTCN PAM
uguauguggggugucaugug

SEQ ID NO: 28674 - RNA, 20 nt, Artificial Sequence
  HTT spacer sequence GTCN PAM
ccagggugaggcugcgagaa

SEQ ID NO: 28675 - RNA, 20 nt, Artificial Sequence
  HTT spacer sequence GTCN PAM
gggguccccagggugaggcu

SEQ ID NO: 28676 - RNA, 20 nt, Artificial Sequence
  HTT spacer sequence GTCN PAM
caguccuccauccccauguc

SEQ ID NO: 28677 - RNA, 20 nt, Artificial Sequence
  HTT spacer sequence GTCN PAM
uccauccccauguccuccuc

SEQ ID NO: 28678 - RNA, 20 nt, Artificial Sequence
  HTT spacer sequence GTCN PAM
uccucaugccuugugccuca

SEQ ID NO: 28679 - RNA, 20 nt, Artificial Sequence
  HTT spacer sequence GTCN PAM
gggcagagcugaggcacaag

SEQ ID NO: 28680 - RNA, 20 nt, Artificial Sequence
  HTT spacer sequence GTCN PAM
acucagcugccccccuacuc

SEQ ID NO: 28681 - RNA, 20 nt, Artificial Sequence
  HTT spacer sequence GTCN PAM
uccaugcagaccucagucuu

SEQ ID NO: 28682 - RNA, 20 nt, Artificial Sequence
  HTT spacer sequence GTCN PAM
gcauggaggacgaguagggg

SEQ ID NO: 28683 - RNA, 20 nt, Artificial Sequence
  HTT spacer sequence GTCN PAM
uggcccugucucugcagcca

SEQ ID NO: 28684 - RNA, 20 nt, Artificial Sequence
  HTT spacer sequence GTCN PAM
cugcagccauccucccgcuc

SEQ ID NO: 28685 - RNA, 20 nt, Artificial Sequence
  HTT spacer sequence GTCN PAM
agugcaggggcugggcagau

SEQ ID NO: 28686 - RNA, 20 nt, Artificial Sequence
  HTT spacer sequence GTCN PAM
cacccuggucuccaauggug

SEQ ID NO: 28687 - RNA, 20 nt, Artificial Sequence
  HTT spacer sequence GTCN PAM
ccaauggugccucaggcaca

SEQ ID NO: 28688 - RNA, 20 nt, Artificial Sequence
  HTT spacer sequence GTCN PAM
ggaagggaagagggaaaccg

SEQ ID NO: 28689 - RNA, 20 nt, Artificial Sequence
  HTT spacer sequence GTCN PAM
auuuccugcccgugcuaggg

SEQ ID NO: 28690 - RNA, 20 nt, Artificial Sequence
  HTT spacer sequence GTCN PAM
ccccagcuggugugaccucc

SEQ ID NO: 28691 - RNA, 20 nt, Artificial Sequence
  HTT spacer sequence GTCN PAM
caccagcuggggggacaaaa

SEQ ID NO: 28692 - RNA, 20 nt, Artificial Sequence
  HTT spacer sequence GTCN PAM
gaguugucccggcacccggc

SEQ ID NO: 28693 - RNA, 20 nt, Artificial Sequence
  HTT spacer sequence GTCN PAM
cggcacccggcacagcggcu

SEQ ID NO: 28694 - RNA, 20 nt, Artificial Sequence
  HTT spacer sequence GTCN PAM
guugagugaaugaucgggug

SEQ ID NO: 28695 - RNA, 20 nt, Artificial Sequence
  HTT spacer sequence GTCN PAM
gcugaacacccgaucauuca

SEQ ID NO: 28696 - RNA, 20 nt, Artificial Sequence
  HTT spacer sequence GTCN PAM
gggcgaggcuugggcgggga

SEQ ID NO: 28697 - RNA, 20 nt, Artificial Sequence
  HTT spacer sequence GTCN PAM
ccgcccaagccucgcccuga

SEQ ID NO: 28698 - RNA, 20 nt, Artificial Sequence
  HTT spacer sequence GTCN PAM
ugaaaccuucucaaaaagca

SEQ ID NO: 28699 - RNA, 20 nt, Artificial Sequence
  HTT spacer sequence GTCN PAM
cacaggaguuucugcuucug

SEQ ID NO: 28700 - RNA, 20 nt, Artificial Sequence
  HTT spacer sequence GTCN PAM
accccgcaacaccagucaca

SEQ ID NO: 28701 - RNA, 20 nt, Artificial Sequence
  HTT spacer sequence GTCN PAM
gagcuccaaaggcccgcgug

SEQ ID NO: 28702 - RNA, 20 nt, Artificial Sequence
  HTT spacer sequence GTCN PAM
gcuguggagcugcaggugga

SEQ ID NO: 28703 - RNA, 20 nt, Artificial Sequence
  HTT spacer sequence GTCN PAM
cuuucucucuccuagccuug

SEQ ID NO: 28704 - RNA, 20 nt, Artificial Sequence
  HTT spacer sequence GTCN PAM
ucaucucgccgguccuuguu

SEQ ID NO: 28705 - RNA, 20 nt, Artificial Sequence
  HTT spacer sequence GTCN PAM
uuguuagcgaacaggcacug

SEQ ID NO: 28706 - RNA, 20 nt, Artificial Sequence
  HTT spacer sequence GTCN PAM
caaacggcugccugaugggg

SEQ ID NO: 28707 - RNA, 20 nt, Artificial Sequence
  HTT spacer sequence GTCN PAM
cccaaguuaauccggcaauu

SEQ ID NO: 28708 - RNA, 20 nt, Artificial Sequence
  HTT spacer sequence GTCN PAM
gauauuaauauuguuaugcc

SEQ ID NO: 28709 - RNA, 20 nt, Artificial Sequence
  HTT spacer sequence GTCN PAM
uuuuuguucuuuuuauugcu

SEQ ID NO: 28710 - RNA, 20 nt, Artificial Sequence
  HTT spacer sequence GTCN PAM
guuagauuuaauuugcucau

SEQ ID NO: 28711 - RNA, 20 nt, Artificial Sequence
  HTT spacer sequence GTCN PAM
ggagcuauucucuguaugcu

SEQ ID NO: 28712 - RNA, 20 nt, Artificial Sequence
  HTT spacer sequence GTCN PAM
aucauaaaaugauaacaaaa

SEQ ID NO: 28713 - RNA, 20 nt, Artificial Sequence
  HTT spacer sequence GTCN PAM
aggaagaaauuaaaauggga

SEQ ID NO: 28714 - RNA, 20 nt, Artificial Sequence
  HTT spacer sequence GTCN PAM
caaauuccugggcccaagug

SEQ ID NO: 28715 - RNA, 20 nt, Artificial Sequence
  HTT spacer sequence GTCN PAM
aggcuggucucaaauuccug

SEQ ID NO: 28716 - RNA, 20 nt, Artificial Sequence
  HTT spacer sequence GTCN PAM
ucuuccucuuuuucuuuuuu

SEQ ID NO: 28717 - RNA, 20 nt, Artificial Sequence
  HTT spacer sequence GTCN PAM
uucauucuugauguuaucuu

SEQ ID NO: 28718 - RNA, 20 nt, Artificial Sequence
  HTT spacer sequence GTCN PAM
uaaguacaguuagagacuaa

SEQ ID NO: 28719 - RNA, 20 nt, Artificial Sequence
  HTT spacer sequence GTCN PAM
cuaacuguacuuaggaccug

SEQ ID NO: 28720 - RNA, 20 nt, Artificial Sequence
  HTT spacer sequence GTCN PAM
uauaguguuacuucuuaguc

SEQ ID NO: 28721 - RNA, 20 nt, Artificial Sequence
  HTT spacer sequence GTCN PAM
gguuaaucaaauguacagua

SEQ ID NO: 28722 - RNA, 20 nt, Artificial Sequence
  HTT spacer sequence GTCN PAM
aagaucaaaacccccauagg

SEQ ID NO: 28723 - RNA, 20 nt, Artificial Sequence
  HTT spacer sequence GTCN PAM
gcuuaggcuaaguaauauug

SEQ ID NO: 28724 - RNA, 20 nt, Artificial Sequence
  HTT spacer sequence GTCN PAM
uuucccucggccacaaggcc

SEQ ID NO: 28725 - RNA, 20 nt, Artificial Sequence
  HTT spacer sequence GTCN PAM
uggcucucagccauacuguu

SEQ ID NO: 28726 - RNA, 20 nt, Artificial Sequence
  HTT spacer sequence GTCN PAM
cugugaaguccgagcacggu

SEQ ID NO: 28727 - RNA, 20 nt, Artificial Sequence
  HTT spacer sequence GTCN PAM
gagcacgguuuuuacugcgg

SEQ ID NO: 28728 - RNA, 20 nt, Artificial Sequence
  HTT spacer sequence GTCN PAM
ugcccagugaggaaggagcg

SEQ ID NO: 28729 - RNA, 20 nt, Artificial Sequence
  HTT spacer sequence GTCN PAM
gauccaaacagugugacucu

SEQ ID NO: 28730 - RNA, 20 nt, Artificial Sequence
  HTT spacer sequence GTCN PAM
cacuguuuggaucugacuca

SEQ ID NO: 28731 - RNA, 20 nt, Artificial Sequence
  HTT spacer sequence GTCN PAM
acagugugccgguucacggc

SEQ ID NO: 28732 - RNA, 20 nt, Artificial Sequence
  HTT spacer sequence GTCN PAM
gcucuauggcaagcuguauu

SEQ ID NO: 28733 - RNA, 20 nt, Artificial Sequence
  HTT spacer sequence GTCN PAM
gcaccugugaaucgugagaa

SEQ ID NO: 28734 - RNA, 20 nt, Artificial Sequence
  HTT spacer sequence GTCN PAM
cuugcugcguaaaaguccag

SEQ ID NO: 28735 - RNA, 20 nt, Artificial Sequence
  HTT spacer sequence GTCN PAM
agggcuuugcagagccucuc

SEQ ID NO: 28736 - RNA, 20 nt, Artificial Sequence
  HTT spacer sequence GTCN PAM
gcaaggagaagcagucucca

SEQ ID NO: 28737 - RNA, 20 nt, Artificial Sequence
  HTT spacer sequence GTCN PAM
ccagagguggcccccugagc

SEQ ID NO: 28738 - RNA, 20 nt, Artificial Sequence
  HTT spacer sequence GTCN PAM
ggccccuucccaggggugga

SEQ ID NO: 28739 - RNA, 20 nt, Artificial Sequence
  HTT spacer sequence GTCN PAM
acuggcccagggagguaggc

SEQ ID NO: 28740 - RNA, 20 nt, Artificial Sequence
  HTT spacer sequence GTCN PAM
cauguccacuggcccaggga

SEQ ID NO: 28741 - RNA, 20 nt, Artificial Sequence
  HTT spacer sequence GTCN PAM
ccaugcuggucccaugucca

SEQ ID NO: 28742 - RNA, 20 nt, Artificial Sequence
  HTT spacer sequence GTCN PAM
uaaaccgggcuuccaaaaau

SEQ ID NO: 28743 - RNA, 20 nt, Artificial Sequence
  HTT spacer sequence GTCN PAM
uuuguccuaaaccgggcuuc

SEQ ID NO: 28744 - RNA, 20 nt, Artificial Sequence
  HTT spacer sequence GTCN PAM
ucacagucccagcaaauacc

SEQ ID NO: 28745 - RNA, 20 nt, Artificial Sequence
  HTT spacer sequence GTCN PAM
cagcaaauaccauuuauaug

SEQ ID NO: 28746 - RNA, 20 nt, Artificial Sequence
  HTT spacer sequence GTCN PAM
uguguuaccucuuuuuggcu

SEQ ID NO: 28747 - RNA, 20 nt, Artificial Sequence
  HTT spacer sequence GTCN PAM
caaauccuuuaugcuuuuac

SEQ ID NO: 28748 - RNA, 20 nt, Artificial Sequence
  HTT spacer sequence GTCN PAM
ucuggccucaguccugcugg

SEQ ID NO: 28749 - RNA, 20 nt, Artificial Sequence
  HTT spacer sequence GTCN PAM
ugcuggguagggugcccuuu

SEQ ID NO: 28750 - RNA, 20 nt, Artificial Sequence
  HTT spacer sequence GTCN PAM
ucucuaucccuggacucuuu

SEQ ID NO: 28751 - RNA, 20 nt, Artificial Sequence
  HTT spacer sequence GTCN PAM
agggauagagaggacgaaag

SEQ ID NO: 28752 - RNA, 20 nt, Artificial Sequence
  HTT spacer sequence GTCN PAM
ccaggacugugucuucaguu

SEQ ID NO: 28753 - RNA, 20 nt, Artificial Sequence
  HTT spacer sequence GTCN PAM
uggggaccugugcuuccacu

SEQ ID NO: 28754 - RNA, 20 nt, Artificial Sequence
  HTT spacer sequence GTCN PAM
ucaguuuucugugugggugg

SEQ ID NO: 28755 - RNA, 20 nt, Artificial Sequence
  HTT spacer sequence GTCN PAM
uaaacccuucccucaagcca

SEQ ID NO: 28756 - RNA, 20 nt, Artificial Sequence
  HTT spacer sequence GTCN PAM
uccucaugaggucagcauuu

SEQ ID NO: 28757 - RNA, 20 nt, Artificial Sequence
  HTT spacer sequence GTCN PAM
gcauuuggggccccugggcu

SEQ ID NO: 28758 - RNA, 20 nt, Artificial Sequence
  HTT spacer sequence GTCN PAM
ucugcguuggguggcguccu

SEQ ID NO: 28759 - RNA, 20 nt, Artificial Sequence
  HTT spacer sequence GTCN PAM
ucugcguugggugguguccu

SEQ ID NO: 28760 - RNA, 20 nt, Artificial Sequence
  HTT spacer sequence GTCN PAM
ucugguggggccaagccaca

SEQ ID NO: 28761 - RNA, 20 nt, Artificial Sequence
  HTT spacer sequence GTCN PAM
gaacuuccuguguggccacu

SEQ ID NO: 28762 - RNA, 20 nt, Artificial Sequence
  HTT spacer sequence GTCN PAM
uuacaaaguauaaauauuuu

SEQ ID NO: 28763 - RNA, 20 nt, Artificial Sequence
  HTT spacer sequence GTCN PAM
guuucacaaaggaauuaacc

SEQ ID NO: 28764 - RNA, 20 nt, Artificial Sequence
  HTT spacer sequence GTCN PAM
guuaggguugaucuuugaaa

SEQ ID NO: 28765 - RNA, 20 nt, Artificial Sequence
  HTT spacer sequence GTCN PAM
uuucuuggagcauccugagg

SEQ ID NO: 28766 - RNA, 20 nt, Artificial Sequence
  HTT spacer sequence GTCN PAM
gaugugaccucaccaacuac

SEQ ID NO: 28767 - RNA, 20 nt, Artificial Sequence
  HTT spacer sequence GTCN PAM
caucugaccacagggagccc

SEQ ID NO: 28768 - RNA, 20 nt, Artificial Sequence
  HTT spacer sequence GTCN PAM
uaguugguagcucuaagccu

SEQ ID NO: 28769 - RNA, 20 nt, Artificial Sequence
  HTT spacer sequence GTCN PAM
cucugaauuuuuaggauucu

SEQ ID NO: 28770 - RNA, 20 nt, Artificial Sequence
  HTT spacer sequence GTCN PAM
cuugucacucugaauuuuua

SEQ ID NO: 28771 - RNA, 20 nt, Artificial Sequence
  HTT spacer sequence GTCN PAM
uugcacaucgccuaacacuu

SEQ ID NO: 28772 - RNA, 20 nt, Artificial Sequence
  HTT spacer sequence GTCN PAM
gugugggaaguguuaggcga

SEQ ID NO: 28773 - RNA, 20 nt, Artificial Sequence
  HTT spacer sequence GTCN PAM
uucuggagagugaaaugcca

SEQ ID NO: 28774 - RNA, 20 nt, Artificial Sequence
  HTT spacer sequence GTCN PAM
cuucagacguagagaguuug

SEQ ID NO: 28775 - RNA, 20 nt, Artificial Sequence
  HTT spacer sequence GTCN PAM
gaagugacaccaaguccuuc

SEQ ID NO: 28776 - RNA, 20 nt, Artificial Sequence
  HTT spacer sequence GTCN PAM
guacuagaaacgugugauuu

SEQ ID NO: 28777 - RNA, 20 nt, Artificial Sequence
  HTT spacer sequence GTCN PAM
uuccuggagucaguacuaga

SEQ ID NO: 28778 - RNA, 20 nt, Artificial Sequence
  HTT spacer sequence GTCN PAM
gugagaccugccaggcgugg

SEQ ID NO: 28779 - RNA, 20 nt, Artificial Sequence
  HTT spacer sequence GTCN PAM
cacggaccccucgagauaua

SEQ ID NO: 28780 - RNA, 20 nt, Artificial Sequence
  HTT spacer sequence GTCN PAM
ggcugugggggccagacuca

SEQ ID NO: 28781 - RNA, 20 nt, Artificial Sequence
  HTT spacer sequence GTCN PAM
ggcccccacagccagaccuc

SEQ ID NO: 28782 - RNA, 20 nt, Artificial Sequence
  HTT spacer sequence GTCN PAM
gcccagaaagugcugcuggg

SEQ ID NO: 28783 - RNA, 20 nt, Artificial Sequence
  HTT spacer sequence GTCN PAM
cgguauccccagcagcacuu

SEQ ID NO: 28784 - RNA, 20 nt, Artificial Sequence
  HTT spacer sequence GTCN PAM
gggcccagcauagucacuga

SEQ ID NO: 28785 - RNA, 20 nt, Artificial Sequence
  HTT spacer sequence GTCN PAM
cugaugucagcccaggcagg

SEQ ID NO: 28786 - RNA, 20 nt, Artificial Sequence
  HTT spacer sequence GTCN PAM
gcccaggcaggucauggaau

SEQ ID NO: 28787 - RNA, 20 nt, Artificial Sequence
  HTT spacer sequence GTCN PAM
uggaauguuuuggaccucag

SEQ ID NO: 28788 - RNA, 20 nt, Artificial Sequence
  HTT spacer sequence GTCN PAM
aaaacauuccaugaccugcc

SEQ ID NO: 28789 - RNA, 20 nt, Artificial Sequence
  HTT spacer sequence GTCN PAM
aucagcccauuuuacagaug

SEQ ID NO: 28790 - RNA, 20 nt, Artificial Sequence
  HTT spacer sequence GTCN PAM
ggcaagaacagguaggguag

SEQ ID NO: 28791 - RNA, 20 nt, Artificial Sequence
  HTT spacer sequence GTCN PAM
uccuuccuccgcaagccagc

SEQ ID NO: 28792 - RNA, 20 nt, Artificial Sequence
  HTT spacer sequence GTCN PAM
ccacccaaaucucaucuuga

SEQ ID NO: 28793 - RNA, 20 nt, Artificial Sequence
  HTT spacer sequence GTCN PAM
aacuguaucaggcauccuau

SEQ ID NO: 28794 - RNA, 20 nt, Artificial Sequence
  HTT spacer sequence GTCN PAM
cacccguuugugcauccaca

SEQ ID NO: 28795 - RNA, 20 nt, Artificial Sequence
  HTT spacer sequence GTCN PAM
gcugaguguggcaagcacug

SEQ ID NO: 28796 - RNA, 20 nt, Artificial Sequence
  HTT spacer sequence GTCN PAM
ugcaucuccaaguggccugg

SEQ ID NO: 28797 - RNA, 20 nt, Artificial Sequence
  HTT spacer sequence GTCN PAM
ccaucauccccuuggaauca

SEQ ID NO: 28798 - RNA, 20 nt, Artificial Sequence
  HTT spacer sequence GTCN PAM
augagcaucuuucaaaauga

SEQ ID NO: 28799 - RNA, 20 nt, Artificial Sequence
  HTT spacer sequence GTCN PAM
cagcuuccucuucuaccuug

SEQ ID NO: 28800 - RNA, 20 nt, Artificial Sequence
  HTT spacer sequence GTCN PAM
gggacaggucccuuggccac

SEQ ID NO: 28801 - RNA, 20 nt, Artificial Sequence
  HTT spacer sequence GTCN PAM
cugacuagccacaccaccuu

SEQ ID NO: 28802 - RNA, 20 nt, Artificial Sequence
  HTT spacer sequence GTCN PAM
cuuggccacagagccacugg

SEQ ID NO: 28803 - RNA, 20 nt, Artificial Sequence
  HTT spacer sequence GTCN PAM
uggcacauugccacccgcca

SEQ ID NO: 28804 - RNA, 20 nt, Artificial Sequence
  HTT spacer sequence GTCN PAM
ggcagagauggcaguguccc

SEQ ID NO: 28805 - RNA, 20 nt, Artificial Sequence
  HTT spacer sequence GTCN PAM
cuggccacaguguccagcag

SEQ ID NO: 28806 - RNA, 20 nt, Artificial Sequence
  HTT spacer sequence GTCN PAM
agcagcagcauggcagccgc

SEQ ID NO: 28807 - RNA, 20 nt, Artificial Sequence
  HTT spacer sequence GTCN PAM
gacaggggugcugcugugac

SEQ ID NO: 28808 - RNA, 20 nt, Artificial Sequence
  HTT spacer sequence GTCN PAM
gaccacagagcccugcugcg

SEQ ID NO: 28809 - RNA, 20 nt, Artificial Sequence
  HTT spacer sequence GTCN PAM
cagcagcaccccugucugac

SEQ ID NO: 28810 - RNA, 20 nt, Artificial Sequence
  HTT spacer sequence GTCN PAM
caggucacagcagcaccccu

SEQ ID NO: 28811 - RNA, 20 nt, Artificial Sequence
  HTT spacer sequence GTCN PAM
ccaccuucaaaggagcccac

SEQ ID NO: 28812 - RNA, 20 nt, Artificial Sequence
  HTT spacer sequence GTCN PAM
uccucuuucaggauguggcu

SEQ ID NO: 28813 - RNA, 20 nt, Artificial Sequence
  HTT spacer sequence GTCN PAM
ccaagaaccaaggggaaggc

SEQ ID NO: 28814 - RNA, 20 nt, Artificial Sequence
  HTT spacer sequence GTCN PAM
cagcgcucucggccagucug

SEQ ID NO: 28815 - RNA, 20 nt, Artificial Sequence
  HTT spacer sequence GTCN PAM
gggaguggcagccaggccac

SEQ ID NO: 28816 - RNA, 20 nt, Artificial Sequence
  HTT spacer sequence GTCN PAM
acccuccggcauccugugug

SEQ ID NO: 28817 - RNA, 20 nt, Artificial Sequence
  HTT spacer sequence GTCN PAM
guggcuacagccccaacggc

SEQ ID NO: 28818 - RNA, 20 nt, Artificial Sequence
  HTT spacer sequence GTCN PAM
ugggccagccccuugggggc

SEQ ID NO: 28819 - RNA, 20 nt, Artificial Sequence
  HTT spacer sequence GTCN PAM
cagagccccauucaugcucc

SEQ ID NO: 28820 - RNA, 20 nt, Artificial Sequence
  HTT spacer sequence GTCN PAM
ccugugcagccaccagccgc

SEQ ID NO: 28821 - RNA, 20 nt, Artificial Sequence
  HTT spacer sequence GTCN PAM
cccgccuugcaugaggcccu

SEQ ID NO: 28822 - RNA, 20 nt, Artificial Sequence
  HTT spacer sequence GTCN PAM
gggccucaugcaaggcgggg

SEQ ID NO: 28823 - RNA, 20 nt, Artificial Sequence
  HTT spacer sequence GTCN PAM
ugucagggccucaugcaagg

SEQ ID NO: 28824 - RNA, 20 nt, Artificial Sequence
  HTT spacer sequence GTCN PAM
ccggugggccacaaggguug

SEQ ID NO: 28825 - RNA, 20 nt, Artificial Sequence
  HTT spacer sequence GTCN PAM
cuuggaucacaggggcagug

SEQ ID NO: 28826 - RNA, 20 nt, Artificial Sequence
  HTT spacer sequence GTCN PAM
gccgauguggcucaguccug

SEQ ID NO: 28827 - RNA, 20 nt, Artificial Sequence
  HTT spacer sequence GTCN PAM
uggcugugaggccucacgcu

SEQ ID NO: 28828 - RNA, 20 nt, Artificial Sequence
  HTT spacer sequence GTCN PAM
gccucgcacugaggagcaaa

SEQ ID NO: 28829 - RNA, 20 nt, Artificial Sequence
  HTT spacer sequence GTCN PAM
ggaugggaugaaaugaagac

SEQ ID NO: 28830 - RNA, 20 nt, Artificial Sequence
  HTT spacer sequence GTCN PAM
ucauuucaucccauccagac

SEQ ID NO: 28831 - RNA, 20 nt, Artificial Sequence
  HTT spacer sequence GTCN PAM
ccucccuaacgggacacugu

SEQ ID NO: 28832 - RNA, 20 nt, Artificial Sequence
  HTT spacer sequence GTCN PAM
cguuagggaggagacgucuu

SEQ ID NO: 28833 - RNA, 20 nt, Artificial Sequence
  HTT spacer sequence GTCN PAM
accccuuccuucuucucccc

SEQ ID NO: 28834 - RNA, 20 nt, Artificial Sequence
  HTT spacer sequence GTCN PAM
gccccgugaggauggggucu

SEQ ID NO: 28835 - RNA, 20 nt, Artificial Sequence
  HTT spacer sequence GTCN PAM
aggguagggcauguggacgg

SEQ ID NO: 28836 - RNA, 20 nt, Artificial Sequence
  HTT spacer sequence GTCN PAM
acaugcccuacccuagaccc

SEQ ID NO: 28837 - RNA, 20 nt, Artificial Sequence
  HTT spacer sequence GTCN PAM
aggugcuuaucuucuagggu

SEQ ID NO: 28838 - RNA, 20 nt, Artificial Sequence
  HTT spacer sequence GTCN PAM
ccaaccccagggugguggag

SEQ ID NO: 28839 - RNA, 20 nt, Artificial Sequence
  HTT spacer sequence GTCN PAM
cucggauggggcugacaccc

SEQ ID NO: 28840 - RNA, 20 nt, Artificial Sequence
  HTT spacer sequence GTCN PAM
gccccauccgagagacggcc

SEQ ID NO: 28841 - RNA, 20 nt, Artificial Sequence
  HTT spacer sequence GTCN PAM
gugccuugggugucagcccc

SEQ ID NO: 28842 - RNA, 20 nt, Artificial Sequence
  HTT spacer sequence GTCN PAM
cccaaagcacauggccucuc

SEQ ID NO: 28843 - RNA, 20 nt, Artificial Sequence
  HTT spacer sequence GTCN PAM
cauccagguucuucugcaga

SEQ ID NO: 28844 - RNA, 20 nt, Artificial Sequence
  HTT spacer sequence GTCN PAM
ccaagcucuggccugggcau

SEQ ID NO: 28845 - RNA, 20 nt, Artificial Sequence
  HTT spacer sequence GTCN PAM
agcuguccccaagcucuggc

SEQ ID NO: 28846 - RNA, 20 nt, Artificial Sequence
  HTT spacer sequence GTCN PAM
aggagggggaguccagaagc

SEQ ID NO: 28847 - RNA, 20 nt, Artificial Sequence
  HTT spacer sequence GTCN PAM
agaagcgcaaaguccaccca

SEQ ID NO: 28848 - RNA, 20 nt, Artificial Sequence
  HTT spacer sequence GTCN PAM
acccagcugggagggcugcu

SEQ ID NO: 28849 - RNA, 20 nt, Artificial Sequence
  HTT spacer sequence GTCN PAM
uuuacaaagcaggcagcucc

SEQ ID NO: 28850 - RNA, 20 nt, Artificial Sequence
  HTT spacer sequence GTCN PAM
ccaccucuucugcccccauc

SEQ ID NO: 28851 - RNA, 20 nt, Artificial Sequence
  HTT spacer sequence GTCN PAM
uggacccgcccaccugcacu

SEQ ID NO: 28852 - RNA, 20 nt, Artificial Sequence
  HTT spacer sequence GTCN PAM
aggacccacagugccgccuc

SEQ ID NO: 28853 - RNA, 20 nt, Artificial Sequence
  HTT spacer sequence GTCN PAM
cugcaggcuuuuaaugggaa

SEQ ID NO: 28854 - RNA, 20 nt, Artificial Sequence
  HTT spacer sequence GTCN PAM
cuuccuccauuucuguuccc

SEQ ID NO: 28855 - RNA, 20 nt, Artificial Sequence
  HTT spacer sequence GTCN PAM
gggagccccuggcagccucu

SEQ ID NO: 28856 - RNA, 20 nt, Artificial Sequence
  HTT spacer sequence GTCN PAM
ccucagugugggggaagccu

SEQ ID NO: 28857 - RNA, 20 nt, Artificial Sequence
  HTT spacer sequence GTCN PAM
guuguccgggugucuaguga

SEQ ID NO: 28858 - RNA, 20 nt, Artificial Sequence
  HTT spacer sequence GTCN PAM
gggugucuagugaccccugg

SEQ ID NO: 28859 - RNA, 20 nt, Artificial Sequence
  HTT spacer sequence GTCN PAM
agugaccccugggguagggg

SEQ ID NO: 28860 - RNA, 20 nt, Artificial Sequence
  HTT spacer sequence GTCN PAM
cuagacacccggacaacaga

SEQ ID NO: 28861 - RNA, 20 nt, Artificial Sequence
  HTT spacer sequence GTCN PAM
gggaagccggauuguuugaa

SEQ ID NO: 28862 - RNA, 20 nt, Artificial Sequence
  HTT spacer sequence GTCN PAM
ucaaacaauccggcuuccca

SEQ ID NO: 28863 - RNA, 20 nt, Artificial Sequence
  HTT spacer sequence GTCN PAM
gcuaggugguugucucugcu

SEQ ID NO: 28864 - RNA, 20 nt, Artificial Sequence
  HTT spacer sequence GTCN PAM
cugcuuuuugaaaaagaagu

SEQ ID NO: 28865 - RNA, 20 nt, Artificial Sequence
  HTT spacer sequence GTCN PAM
ccgcccgacccccgccccgc

SEQ ID NO: 28866 - RNA, 20 nt, Artificial Sequence
  HTT spacer sequence GTCN PAM
ggcggggacuucuuuuucaa

SEQ ID NO: 28867 - RNA, 20 nt, Artificial Sequence
  HTT spacer sequence GTCN PAM
gagcgucugagcccagaugg

SEQ ID NO: 28868 - RNA, 20 nt, Artificial Sequence
  HTT spacer sequence GTCN PAM
gagcccagauggugcgcuug

SEQ ID NO: 28869 - RNA, 20 nt, Artificial Sequence
  HTT spacer sequence GTCN PAM
cgcggcggccacuggagccg

SEQ ID NO: 28870 - RNA, 20 nt, Artificial Sequence
  HTT spacer sequence GTCN PAM
ccggugucgccgcccugccc

SEQ ID NO: 28871 - RNA, 20 nt, Artificial Sequence
  HTT spacer sequence GTCN PAM
ccgcccugcccgcgggcccg

SEQ ID NO: 28872 - RNA, 20 nt, Artificial Sequence
  HTT spacer sequence GTCN PAM
cuuucaaaauagcucgcagg

SEQ ID NO: 28873 - RNA, 20 nt, Artificial Sequence
  HTT spacer sequence GTCN PAM
ugguuccgcgccgccgcgcu

SEQ ID NO: 28874 - RNA, 20 nt, Artificial Sequence
  HTT spacer sequence GTCN PAM
ucuucugucaugguuccgcg

SEQ ID NO: 28875 - RNA, 20 nt, Artificial Sequence
  HTT spacer sequence GTCN PAM
agcugcgggacggcaagaag

SEQ ID NO: 28876 - RNA, 20 nt, Artificial Sequence
  HTT spacer sequence GTCN PAM
cgcagcuugaccuggcccuc

SEQ ID NO: 28877 - RNA, 20 nt, Artificial Sequence
  HTT spacer sequence GTCN PAM
gggcgcgucgggggcgcggg

SEQ ID NO: 28878 - RNA, 20 nt, Artificial Sequence
  HTT spacer sequence GTCN PAM
ggggcgcggggggggggggc

SEQ ID NO: 28879 - RNA, 20 nt, Artificial Sequence
  HTT spacer sequence GTCN PAM
ccgcaguggaagaguaggug

SEQ ID NO: 28880 - RNA, 20 nt, Artificial Sequence
  HTT spacer sequence GTCN PAM
cccguggcaggugagcgggg

SEQ ID NO: 28881 - RNA, 20 nt, Artificial Sequence
  HTT spacer sequence GTCN PAM
cccgcccgccccgcucaccu

SEQ ID NO: 28882 - RNA, 20 nt, Artificial Sequence
  HTT spacer sequence GTCN PAM
cuacccccgcgccccccguc

SEQ ID NO: 28883 - RNA, 20 nt, Artificial Sequence
  HTT spacer sequence GTCN PAM
ccccgccgggaaacccgaga

SEQ ID NO: 28884 - RNA, 20 nt, Artificial Sequence
  HTT spacer sequence GTCN PAM
gcacggggcucucggguuuc

SEQ ID NO: 28885 - RNA, 20 nt, Artificial Sequence
  HTT spacer sequence GTCN PAM
ggguccgcacggggcucucg

SEQ ID NO: 28886 - RNA, 20 nt, Artificial Sequence
  HTT spacer sequence GTCN PAM
agggcccccaccugcgcucc

SEQ ID NO: 28887 - RNA, 20 nt, Artificial Sequence
  HTT spacer sequence GTCN PAM
gcccugcuggaaagaggguu

SEQ ID NO: 28888 - RNA, 20 nt, Artificial Sequence
  HTT spacer sequence GTCN PAM
ccuccgccuacagggccacc

SEQ ID NO: 28889 - RNA, 20 nt, Artificial Sequence
  HTT spacer sequence GTCN PAM
gcgcuaacccacgcagcacc

SEQ ID NO: 28890 - RNA, 20 nt, Artificial Sequence
  HTT spacer sequence GTCN PAM
agggucagcgcuaacccacg

SEQ ID NO: 28891 - RNA, 20 nt, Artificial Sequence
  HTT spacer sequence GTCN PAM
gccugggagggguccagggu

SEQ ID NO: 28892 - RNA, 20 nt, Artificial Sequence
  HTT spacer sequence GTCN PAM
cucugcccugcccuaccgca

SEQ ID NO: 28893 - RNA, 20 nt, Artificial Sequence
  HTT spacer sequence GTCN PAM
ucugggaggaggcagggguc

SEQ ID NO: 28894 - RNA, 20 nt, Artificial Sequence
  HTT spacer sequence GTCN PAM
ccccccaguccccgcccuga

SEQ ID NO: 28895 - RNA, 20 nt, Artificial Sequence
  HTT spacer sequence GTCN PAM
ccgcccugagccagcacccc

SEQ ID NO: 28896 - RNA, 20 nt, Artificial Sequence
  HTT spacer sequence GTCN PAM
gcauggagcccccaggucug

SEQ ID NO: 28897 - RNA, 20 nt, Artificial Sequence
  HTT spacer sequence GTCN PAM
ggcagcccaggccgccugca

SEQ ID NO: 28898 - RNA, 20 nt, Artificial Sequence
  HTT spacer sequence GTCN PAM
ucuggagcagcugcaggccc

SEQ ID NO: 28899 - RNA, 20 nt, Artificial Sequence
  HTT spacer sequence GTCN PAM
gggugggaugcucggccugu

SEQ ID NO: 28900 - RNA, 20 nt, Artificial Sequence
  HTT spacer sequence GTCN PAM
uggagggugcucuggcagcc

SEQ ID NO: 28901 - RNA, 20 nt, Artificial Sequence
  HTT spacer sequence GTCN PAM
gugacucccagggagggugu

SEQ ID NO: 28902 - RNA, 20 nt, Artificial Sequence
  HTT spacer sequence GTCN PAM
cagacacccguccuggaggg

SEQ ID NO: 28903 - RNA, 20 nt, Artificial Sequence
  HTT spacer sequence GTCN PAM
ccucugcagggccucaggug

SEQ ID NO: 28904 - RNA, 20 nt, Artificial Sequence
  HTT spacer sequence GTCN PAM
uggaggaaagcacuuccugc

SEQ ID NO: 28905 - RNA, 20 nt, Artificial Sequence
  HTT spacer sequence GTCN PAM
aggcccugcaaggggaggcg

SEQ ID NO: 28906 - RNA, 20 nt, Artificial Sequence
  HTT spacer sequence GTCN PAM
cuucuccacucagcccuccg

SEQ ID NO: 28907 - RNA, 20 nt, Artificial Sequence
  HTT spacer sequence GTCN PAM
gggcacggagggcugagugg

SEQ ID NO: 28908 - RNA, 20 nt, Artificial Sequence
  HTT spacer sequence GTCN PAM
gugcccccacagcuccaggc

SEQ ID NO: 28909 - RNA, 20 nt, Artificial Sequence
  HTT spacer sequence GTCN PAM
uuguccuccggggcugcagg

SEQ ID NO: 28910 - RNA, 20 nt, Artificial Sequence
  HTT spacer sequence GTCN PAM
uccggggcugcaggggaccu

SEQ ID NO: 28911 - RNA, 20 nt, Artificial Sequence
  HTT spacer sequence GTCN PAM
ccugcagccccggaggacaa

SEQ ID NO: 28912 - RNA, 20 nt, Artificial Sequence
  HTT spacer sequence GTCN PAM
gggcagagugagaggcccug

SEQ ID NO: 28913 - RNA, 20 nt, Artificial Sequence
  HTT spacer sequence GTCN PAM
uccgccccagccuggcaggg

SEQ ID NO: 28914 - RNA, 20 nt, Artificial Sequence
  HTT spacer sequence GTCN PAM
gcuguggcugggucggggcc

SEQ ID NO: 28915 - RNA, 20 nt, Artificial Sequence
  HTT spacer sequence GTCN PAM
gggccgugguggggcaggug

SEQ ID NO: 28916 - RNA, 20 nt, Artificial Sequence
  HTT spacer sequence GTCN PAM
gcaccggcuccagcccagca

SEQ ID NO: 28917 - RNA, 20 nt, Artificial Sequence
  HTT spacer sequence GTCN PAM
cgggugccuuccugggaugc

SEQ ID NO: 28918 - RNA, 20 nt, Artificial Sequence
  HTT spacer sequence GTCN PAM
ggggagaagucuuugucccu

SEQ ID NO: 28919 - RNA, 20 nt, Artificial Sequence
  HTT spacer sequence GTCN PAM
uugucccuguuggagggauu

SEQ ID NO: 28920 - RNA, 20 nt, Artificial Sequence
  HTT spacer sequence GTCN PAM
cuguuggagggauuuucuuu

SEQ ID NO: 28921 - RNA, 20 nt, Artificial Sequence
  HTT spacer sequence GTCN PAM
gaugcagaaagaaaaucccu

SEQ ID NO: 28922 - RNA, 20 nt, Artificial Sequence
  HTT spacer sequence GTCN PAM
caggaggcagggccugccag

SEQ ID NO: 28923 - RNA, 20 nt, Artificial Sequence
  HTT spacer sequence GTCN PAM
cuccacucaggcacucaccg

SEQ ID NO: 28924 - RNA, 20 nt, Artificial Sequence
  HTT spacer sequence GTCN PAM
cccaggugggacaaucugug

SEQ ID NO: 28925 - RNA, 20 nt, Artificial Sequence
  HTT spacer sequence GTCN PAM
caccugggggacccauugca

SEQ ID NO: 28926 - RNA, 20 nt, Artificial Sequence
  HTT spacer sequence GTCN PAM
guaggugaacaugguggcuc

SEQ ID NO: 28927 - RNA, 20 nt, Artificial Sequence
  HTT spacer sequence GTCN PAM
gcuggguuaucccguauccu

SEQ ID NO: 28928 - RNA, 20 nt, Artificial Sequence
  HTT spacer sequence GTCN PAM
cuagcacccacugacucacu

SEQ ID NO: 28929 - RNA, 20 nt, Artificial Sequence
  HTT spacer sequence GTCN PAM
gugggugcuagggacaccug

SEQ ID NO: 28930 - RNA, 20 nt, Artificial Sequence
  HTT spacer sequence GTCN PAM
caggccagugagucaguggg

SEQ ID NO: 28931 - RNA, 20 nt, Artificial Sequence
  HTT spacer sequence GTCN PAM
aaagcaaugggucccaggcc

SEQ ID NO: 28932 - RNA, 20 nt, Artificial Sequence
  HTT spacer sequence GTCN PAM
cuccagcagcccaggguuga

SEQ ID NO: 28933 - RNA, 20 nt, Artificial Sequence
  HTT spacer sequence GTCN PAM
guuucaacccugggcugcug

SEQ ID NO: 28934 - RNA, 20 nt, Artificial Sequence
  HTT spacer sequence GTCN PAM
gucagaugaggggaugggac

SEQ ID NO: 28935 - RNA, 20 nt, Artificial Sequence
  HTT spacer sequence GTCN PAM
gaugaggggaugggacagag

SEQ ID NO: 28936 - RNA, 20 nt, Artificial Sequence
  HTT spacer sequence GTCN PAM
cauccccucaucugaccgac

SEQ ID NO: 28937 - RNA, 20 nt, Artificial Sequence
  HTT spacer sequence GTCN PAM
ggguggggaggugggcguga

SEQ ID NO: 28938 - RNA, 20 nt, Artificial Sequence
  HTT spacer sequence GTCN PAM
ccagcgcugagcgggaaggc

SEQ ID NO: 28939 - RNA, 20 nt, Artificial Sequence
  HTT spacer sequence GTCN PAM
gcuccuccagggcuggggcc

SEQ ID NO: 28940 - RNA, 20 nt, Artificial Sequence
  HTT spacer sequence GTCN PAM
gugcugucugcuccuccagg

SEQ ID NO: 28941 - RNA, 20 nt, Artificial Sequence
  HTT spacer sequence GTCN PAM
cgucugcuuccuuguaagac

SEQ ID NO: 28942 - RNA, 20 nt, Artificial Sequence
  HTT spacer sequence GTCN PAM
gcuuccuuguaagacaggca

SEQ ID NO: 28943 - RNA, 20 nt, Artificial Sequence
  HTT spacer sequence GTCN PAM
uacaaggaagcagacgggac

SEQ ID NO: 28944 - RNA, 20 nt, Artificial Sequence
  HTT spacer sequence GTCN PAM
uucuguuaugacaagguuua

SEQ ID NO: 28945 - RNA, 20 nt, Artificial Sequence
  HTT spacer sequence GTCN PAM
uaacagaaagacgugcucac

SEQ ID NO: 28946 - RNA, 20 nt, Artificial Sequence
  HTT spacer sequence GTCN PAM
acuggccaugccaggcgcug

SEQ ID NO: 28947 - RNA, 20 nt, Artificial Sequence
  HTT spacer sequence GTCN PAM
ggccgucugccucggugugg

SEQ ID NO: 28948 - RNA, 20 nt, Artificial Sequence
  HTT spacer sequence GTCN PAM
gccucggugugggacugcag

SEQ ID NO: 28949 - RNA, 20 nt, Artificial Sequence
  HTT spacer sequence GTCN PAM
cacaccgaggcagacggccc

SEQ ID NO: 28950 - RNA, 20 nt, Artificial Sequence
  HTT spacer sequence GTCN PAM
cacugcagggcacccugcag

SEQ ID NO: 28951 - RNA, 20 nt, Artificial Sequence
  HTT spacer sequence GTCN PAM
ccaccgcguccucacugcgg

SEQ ID NO: 28952 - RNA, 20 nt, Artificial Sequence
  HTT spacer sequence GTCN PAM
ucacugcggaaugcgugucu

SEQ ID NO: 28953 - RNA, 20 nt, Artificial Sequence
  HTT spacer sequence GTCN PAM
gcguccccucucugggcagg

SEQ ID NO: 28954 - RNA, 20 nt, Artificial Sequence
  HTT spacer sequence GTCN PAM
ccucucugggcagggccccg

SEQ ID NO: 28955 - RNA, 20 nt, Artificial Sequence
  HTT spacer sequence GTCN PAM
guguccaguuguggcccagg

SEQ ID NO: 28956 - RNA, 20 nt, Artificial Sequence
  HTT spacer sequence GTCN PAM
aguuguggcccaggacucac

SEQ ID NO: 28957 - RNA, 20 nt, Artificial Sequence
  HTT spacer sequence GTCN PAM
ugggccacaacuggacacag

SEQ ID NO: 28958 - RNA, 20 nt, Artificial Sequence
  HTT spacer sequence GTCN PAM
agaacacuuuccucaccacc

SEQ ID NO: 28959 - RNA, 20 nt, Artificial Sequence
  HTT spacer sequence GTCN PAM
ggccuggggccacacucucc

SEQ ID NO: 28960 - RNA, 20 nt, Artificial Sequence
  HTT spacer sequence GTCN PAM
uggagcuggcagggucuugg

SEQ ID NO: 28961 - RNA, 20 nt, Artificial Sequence
  HTT spacer sequence GTCN PAM
uggagucaccaugguggggg

SEQ ID NO: 28962 - RNA, 20 nt, Artificial Sequence
  HTT spacer sequence GTCN PAM
ccaugguggggggaagcuga

SEQ ID NO: 28963 - RNA, 20 nt, Artificial Sequence
  HTT spacer sequence GTCN PAM
ugggccagaucccucggguu

SEQ ID NO: 28964 - RNA, 20 nt, Artificial Sequence
  HTT spacer sequence GTCN PAM
augucuugggccagaucccu

SEQ ID NO: 28965 - RNA, 20 nt, Artificial Sequence
  HTT spacer sequence GTCN PAM
ccccuauccuugcucucggu

SEQ ID NO: 28966 - RNA, 20 nt, Artificial Sequence
  HTT spacer sequence GTCN PAM
caccgagagcaaggauaggg

SEQ ID NO: 28967 - RNA, 20 nt, Artificial Sequence
  HTT spacer sequence GTCN PAM
cuccugcaggccgggcucag

SEQ ID NO: 28968 - RNA, 20 nt, Artificial Sequence
  HTT spacer sequence GTCN PAM
ccguggggucccuccugcag

SEQ ID NO: 28969 - RNA, 20 nt, Artificial Sequence
  HTT spacer sequence GTCN PAM
uggggcccugcccuccacag

SEQ ID NO: 28970 - RNA, 20 nt, Artificial Sequence
  HTT spacer sequence GTCN PAM
acccccagccccucguuagc

SEQ ID NO: 28971 - RNA, 20 nt, Artificial Sequence
  HTT spacer sequence GTCN PAM
gcccuuccugagcagagccu

SEQ ID NO: 28972 - RNA, 20 nt, Artificial Sequence
  HTT spacer sequence GTCN PAM
ggcuccugccccaacggacu

SEQ ID NO: 28973 - RNA, 20 nt, Artificial Sequence
  HTT spacer sequence GTCN PAM
guuggggcaggagccagacg

SEQ ID NO: 28974 - RNA, 20 nt, Artificial Sequence
  HTT spacer sequence GTCN PAM
gccccaguccguuggggcag

SEQ ID NO: 28975 - RNA, 20 nt, Artificial Sequence
  HTT spacer sequence GTCN PAM
ucagcccggagcugggaugu

SEQ ID NO: 28976 - RNA, 20 nt, Artificial Sequence
  HTT spacer sequence GTCN PAM
cccuguucuugauguuucua

SEQ ID NO: 28977 - RNA, 20 nt, Artificial Sequence
  HTT spacer sequence GTCN PAM
ggacagggaaucagagagcu

SEQ ID NO: 28978 - RNA, 20 nt, Artificial Sequence
  HTT spacer sequence GTCN PAM
ugacgcgggggcugagggaa

SEQ ID NO: 28979 - RNA, 20 nt, Artificial Sequence
  HTT spacer sequence GTCN PAM
cugcucccacauguggagcu

SEQ ID NO: 28980 - RNA, 20 nt, Artificial Sequence
  HTT spacer sequence GTCN PAM
caggucacugcucccacaug

SEQ ID NO: 28981 - RNA, 20 nt, Artificial Sequence
  HTT spacer sequence GTCN PAM
ucgucuacucacagggcucu

SEQ ID NO: 28982 - RNA, 20 nt, Artificial Sequence
  HTT spacer sequence GTCN PAM
acucacagggcucuugaggg

SEQ ID NO: 28983 - RNA, 20 nt, Artificial Sequence
  HTT spacer sequence GTCN PAM
ugggcugcccuuggugaugu

SEQ ID NO: 28984 - RNA, 20 nt, Artificial Sequence
  HTT spacer sequence GTCN PAM
guggucuggggggcccaccu

SEQ ID NO: 28985 - RNA, 20 nt, Artificial Sequence
  HTT spacer sequence TTCN PAM
aauuauuuuuagggauauca

SEQ ID NO: 28986 - RNA, 20 nt, Artificial Sequence
  HTT spacer sequence TTCN PAM
caaaaacugaaauccaaaga

SEQ ID NO: 28987 - RNA, 20 nt, Artificial Sequence
  HTT spacer sequence TTCN PAM
guuuuugagaauguuuccaa

SEQ ID NO: 28988 - RNA, 20 nt, Artificial Sequence
  HTT spacer sequence TTCN PAM
uuggauuucaguuuuugaga

SEQ ID NO: 28989 - RNA, 20 nt, Artificial Sequence
  HTT spacer sequence TTCN PAM
uggggagacugggcuagcac

SEQ ID NO: 28990 - RNA, 20 nt, Artificial Sequence
  HTT spacer sequence TTCN PAM
ggugggggagagccaagcgc

SEQ ID NO: 28991 - RNA, 20 nt, Artificial Sequence
  HTT spacer sequence TTCN PAM
uuguccauggaggggccccc

SEQ ID NO: 28992 - RNA, 20 nt, Artificial Sequence
  HTT spacer sequence TTCN PAM
ugcuggagggaggcaggggg

SEQ ID NO: 28993 - RNA, 20 nt, Artificial Sequence
  HTT spacer sequence TTCN PAM
cauuguuuuccugcuggagg

SEQ ID NO: 28994 - RNA, 20 nt, Artificial Sequence
  HTT spacer sequence TTCN PAM
auuucucauuguuuuccugc

SEQ ID NO: 28995 - RNA, 20 nt, Artificial Sequence
  HTT spacer sequence TTCN PAM
aaaugcuuacuguaagaagg

SEQ ID NO: 28996 - RNA, 20 nt, Artificial Sequence
  HTT spacer sequence TTCN PAM
uacaguaagcauuuugaagc

SEQ ID NO: 28997 - RNA, 20 nt, Artificial Sequence
  HTT spacer sequence TTCN PAM
uucuuacaguaagcauuuug

SEQ ID NO: 28998 - RNA, 20 nt, Artificial Sequence
  HTT spacer sequence TTCN PAM
auucauccuauccaacuauu

SEQ ID NO: 28999 - RNA, 20 nt, Artificial Sequence
  HTT spacer sequence TTCN PAM
uccuauccaacuauucuaca

SEQ ID NO: 29000 - RNA, 20 nt, Artificial Sequence
  HTT spacer sequence TTCN PAM
acauuaauuaccauaacaua

SEQ ID NO: 29001 - RNA, 20 nt, Artificial Sequence
  HTT spacer sequence TTCN PAM
auucuacuugugcuuaaucu

SEQ ID NO: 29002 - RNA, 20 nt, Artificial Sequence
  HTT spacer sequence TTCN PAM
acuugugcuuaaucuauuca

SEQ ID NO: 29003 - RNA, 20 nt, Artificial Sequence
  HTT spacer sequence TTCN PAM
gaucagucaaaaaauaucca

SEQ ID NO: 29004 - RNA, 20 nt, Artificial Sequence
  HTT spacer sequence TTCN PAM
cuuuugucuuccuccuucaa

SEQ ID NO: 29005 - RNA, 20 nt, Artificial Sequence
  HTT spacer sequence TTCN PAM
uccuucaaacacuugacuug

SEQ ID NO: 29006 - RNA, 20 nt, Artificial Sequence
  HTT spacer sequence TTCN PAM
aacacuugacuugcccauca

SEQ ID NO: 29007 - RNA, 20 nt, Artificial Sequence
  HTT spacer sequence TTCN PAM
guuggauugcaaaaaaaacu

SEQ ID NO: 29008 - RNA, 20 nt, Artificial Sequence
  HTT spacer sequence TTCN PAM
ccaaaugggacucauguaaa

SEQ ID NO: 29009 - RNA, 20 nt, Artificial Sequence
  HTT spacer sequence TTCN PAM
ugcaggaaaggagacuuugc

SEQ ID NO: 29010 - RNA, 20 nt, Artificial Sequence
  HTT spacer sequence TTCN PAM
ugcaggaaggcacuggacug

SEQ ID NO: 29011 - RNA, 20 nt, Artificial Sequence
  HTT spacer sequence TTCN PAM
uccuggcuguagagguucga

SEQ ID NO: 29012 - RNA, 20 nt, Artificial Sequence
  HTT spacer sequence TTCN PAM
agcaaggugacuugucuuga

SEQ ID NO: 29013 - RNA, 20 nt, Artificial Sequence
  HTT spacer sequence TTCN PAM
caaaugacccucacaccuca

SEQ ID NO: 29014 - RNA, 20 nt, Artificial Sequence
  HTT spacer sequence TTCN PAM
auccguuaaggcacugaggu

SEQ ID NO: 29015 - RNA, 20 nt, Artificial Sequence
  HTT spacer sequence TTCN PAM
ccgcugccacccgagcccug

SEQ ID NO: 29016 - RNA, 20 nt, Artificial Sequence
  HTT spacer sequence TTCN PAM
ccaugucggacuggccccca

SEQ ID NO: 29017 - RNA, 20 nt, Artificial Sequence
  HTT spacer sequence TTCN PAM
uccucagggggaccuguaac

SEQ ID NO: 29018 - RNA, 20 nt, Artificial Sequence
  HTT spacer sequence TTCN PAM
cagcaaccaaguacccgcca

SEQ ID NO: 29019 - RNA, 20 nt, Artificial Sequence
  HTT spacer sequence TTCN PAM
gguagguggcggguacuugg

SEQ ID NO: 29020 - RNA, 20 nt, Artificial Sequence
  HTT spacer sequence TTCN PAM
cucucagaauggccuggcug

SEQ ID NO: 29021 - RNA, 20 nt, Artificial Sequence
  HTT spacer sequence TTCN PAM
gagagugaaagcgucucagu

SEQ ID NO: 29022 - RNA, 20 nt, Artificial Sequence
  HTT spacer sequence TTCN PAM
uccagccaggccauucugag

SEQ ID NO: 29023 - RNA, 20 nt, Artificial Sequence
  HTT spacer sequence TTCN PAM
aguuccuccagccaggccau

SEQ ID NO: 29024 - RNA, 20 nt, Artificial Sequence
  HTT spacer sequence TTCN PAM
uggagucucagaggccauca

SEQ ID NO: 29025 - RNA, 20 nt, Artificial Sequence
  HTT spacer sequence TTCN PAM
ugucaguguuucuuggaguc

SEQ ID NO: 29026 - RNA, 20 nt, Artificial Sequence
  HTT spacer sequence TTCN PAM
guggaaguccccgccugcuu

SEQ ID NO: 29027 - RNA, 20 nt, Artificial Sequence
  HTT spacer sequence TTCN PAM
acagaaccaacguuuagcua

SEQ ID NO: 29028 - RNA, 20 nt, Artificial Sequence
  HTT spacer sequence TTCN PAM
gccauuauugacugggguca

SEQ ID NO: 29029 - RNA, 20 nt, Artificial Sequence
  HTT spacer sequence TTCN PAM
agaaggcaggucucagcauc

SEQ ID NO: 29030 - RNA, 20 nt, Artificial Sequence
  HTT spacer sequence TTCN PAM
ggaauuguugggagcaugug

SEQ ID NO: 29031 - RNA, 20 nt, Artificial Sequence
  HTT spacer sequence TTCN PAM
cuagugucagguggggaugc

SEQ ID NO: 29032 - RNA, 20 nt, Artificial Sequence
  HTT spacer sequence TTCN PAM
cgucccucccacaccugugc

SEQ ID NO: 29033 - RNA, 20 nt, Artificial Sequence
  HTT spacer sequence TTCN PAM
cagccaggcccuggagcucc

SEQ ID NO: 29034 - RNA, 20 nt, Artificial Sequence
  HTT spacer sequence TTCN PAM
gugguugccggucauguguc

SEQ ID NO: 29035 - RNA, 20 nt, Artificial Sequence
  HTT spacer sequence TTCN PAM
ugucuucagugguugccggu

SEQ ID NO: 29036 - RNA, 20 nt, Artificial Sequence
  HTT spacer sequence TTCN PAM
ccaguguuuucuugucuuca

SEQ ID NO: 29037 - RNA, 20 nt, Artificial Sequence
  HTT spacer sequence TTCN PAM
gugcuuccccaguguuuucu

SEQ ID NO: 29038 - RNA, 20 nt, Artificial Sequence
  HTT spacer sequence TTCN PAM
cagcauuuauuuuucuucaa

SEQ ID NO: 29039 - RNA, 20 nt, Artificial Sequence
  HTT spacer sequence TTCN PAM
ucaaauuggaaucagcucac

SEQ ID NO: 29040 - RNA, 20 nt, Artificial Sequence
  HTT spacer sequence TTCN PAM
aauuggaaucagcucaccau

SEQ ID NO: 29041 - RNA, 20 nt, Artificial Sequence
  HTT spacer sequence TTCN PAM
aauuugaagaaaaauaaaug

SEQ ID NO: 29042 - RNA, 20 nt, Artificial Sequence
  HTT spacer sequence TTCN PAM
ccuuugcacccggcacaccc

SEQ ID NO: 29043 - RNA, 20 nt, Artificial Sequence
  HTT spacer sequence TTCN PAM
cacauuuagagcaagcacau

SEQ ID NO: 29044 - RNA, 20 nt, Artificial Sequence
  HTT spacer sequence TTCN PAM
gggaauucuugguggcugaa

SEQ ID NO: 29045 - RNA, 20 nt, Artificial Sequence
  HTT spacer sequence TTCN PAM
cagaauaccggaugugcuug

SEQ ID NO: 29046 - RNA, 20 nt, Artificial Sequence
  HTT spacer sequence TTCN PAM
ugguggcugaaaauggccac

SEQ ID NO: 29047 - RNA, 20 nt, Artificial Sequence
  HTT spacer sequence TTCN PAM
gccaccaagaauucccagaa

SEQ ID NO: 29048 - RNA, 20 nt, Artificial Sequence
  HTT spacer sequence TTCN PAM
guggccauuuucagccacca

SEQ ID NO: 29049 - RNA, 20 nt, Artificial Sequence
  HTT spacer sequence TTCN PAM
accuuaagaggagagauggc

SEQ ID NO: 29050 - RNA, 20 nt, Artificial Sequence
  HTT spacer sequence TTCN PAM
cucccccgucugcccugccu

SEQ ID NO: 29051 - RNA, 20 nt, Artificial Sequence
  HTT spacer sequence TTCN PAM
cguaauugauauuuggacuc

SEQ ID NO: 29052 - RNA, 20 nt, Artificial Sequence
  HTT spacer sequence TTCN PAM
guuaaaugggcgagucagag

SEQ ID NO: 29053 - RNA, 20 nt, Artificial Sequence
  HTT spacer sequence TTCN PAM
aguaagcgcccagcccugcc

SEQ ID NO: 29054 - RNA, 20 nt, Artificial Sequence
  HTT spacer sequence TTCN PAM
cuggcagggcagggcugggc

SEQ ID NO: 29055 - RNA, 20 nt, Artificial Sequence
  HTT spacer sequence TTCN PAM
guuugugguugggggagugu

SEQ ID NO: 29056 - RNA, 20 nt, Artificial Sequence
  HTT spacer sequence TTCN PAM
ugcgcuuugcugagguuucu

SEQ ID NO: 29057 - RNA, 20 nt, Artificial Sequence
  HTT spacer sequence TTCN PAM
uaagaggccagggaguaggu

SEQ ID NO: 29058 - RNA, 20 nt, Artificial Sequence
  HTT spacer sequence TTCN PAM
acaaagccaccucaagagca

SEQ ID NO: 29059 - RNA, 20 nt, Artificial Sequence
  HTT spacer sequence TTCN PAM
acaucagcacucaggcugug

SEQ ID NO: 29060 - RNA, 20 nt, Artificial Sequence
  HTT spacer sequence TTCN PAM
uuuuuccacaucagcacuca

SEQ ID NO: 29061 - RNA, 20 nt, Artificial Sequence
  HTT spacer sequence TTCN PAM
gggagggguggcaugaccug

SEQ ID NO: 29062 - RNA, 20 nt, Artificial Sequence
  HTT spacer sequence TTCN PAM
gaauucagagaaccacacac

SEQ ID NO: 29063 - RNA, 20 nt, Artificial Sequence
  HTT spacer sequence TTCN PAM
gaaggcucuggggcuccccc

SEQ ID NO: 29064 - RNA, 20 nt, Artificial Sequence
  HTT spacer sequence TTCN PAM
gagaaccacacacagcugag

SEQ ID NO: 29065 - RNA, 20 nt, Artificial Sequence
  HTT spacer sequence TTCN PAM
cugaauucagaaggcucugg

SEQ ID NO: 29066 - RNA, 20 nt, Artificial Sequence
  HTT spacer sequence TTCN PAM
ugagcccccuccgugccagg

SEQ ID NO: 29067 - RNA, 20 nt, Artificial Sequence
  HTT spacer sequence TTCN PAM
ggaugcugcacaggcugagc

SEQ ID NO: 29068 - RNA, 20 nt, Artificial Sequence
  HTT spacer sequence TTCN PAM
agcagcucaccucagagaga

SEQ ID NO: 29069 - RNA, 20 nt, Artificial Sequence
  HTT spacer sequence TTCN PAM
cucugaggugagcugcugga

SEQ ID NO: 29070 - RNA, 20 nt, Artificial Sequence
  HTT spacer sequence TTCN PAM
gcugauaaacuccaagugcc

SEQ ID NO: 29071 - RNA, 20 nt, Artificial Sequence
  HTT spacer sequence TTCN PAM
uuuucagcugauaaacucca

SEQ ID NO: 29072 - RNA, 20 nt, Artificial Sequence
  HTT spacer sequence TTCN PAM
ucaguagccuggcuagaagu

SEQ ID NO: 29073 - RNA, 20 nt, Artificial Sequence
  HTT spacer sequence TTCN PAM
agccaggcuacugaugaauu

SEQ ID NO: 29074 - RNA, 20 nt, Artificial Sequence
  HTT spacer sequence TTCN PAM
agggacuugggauuugagug

SEQ ID NO: 29075 - RNA, 20 nt, Artificial Sequence
  HTT spacer sequence TTCN PAM
uuucccaggugacgcaaagc

SEQ ID NO: 29076 - RNA, 20 nt, Artificial Sequence
  HTT spacer sequence TTCN PAM
caggugacgcaaagcaggga

SEQ ID NO: 29077 - RNA, 20 nt, Artificial Sequence
  HTT spacer sequence TTCN PAM
cugcuuugcgucaccuggga

SEQ ID NO: 29078 - RNA, 20 nt, Artificial Sequence
  HTT spacer sequence TTCN PAM
aagccccagcuguauacuuc

SEQ ID NO: 29079 - RNA, 20 nt, Artificial Sequence
  HTT spacer sequence TTCN PAM
gggggaucucugucaucgcc

SEQ ID NO: 29080 - RNA, 20 nt, Artificial Sequence
  HTT spacer sequence TTCN PAM
ggaccaaacagauauaucca

SEQ ID NO: 29081 - RNA, 20 nt, Artificial Sequence
  HTT spacer sequence TTCN PAM
uuuccagggugccgccccuc

SEQ ID NO: 29082 - RNA, 20 nt, Artificial Sequence
  HTT spacer sequence TTCN PAM
agggugccgccccucucaac

SEQ ID NO: 29083 - RNA, 20 nt, Artificial Sequence
  HTT spacer sequence TTCN PAM
agggcccaugaccaaguggg

SEQ ID NO: 29084 - RNA, 20 nt, Artificial Sequence
  HTT spacer sequence TTCN PAM
agcccacuuggucaugggcc

SEQ ID NO: 29085 - RNA, 20 nt, Artificial Sequence
  HTT spacer sequence TTCN PAM
ggguuccagcccacuugguc

SEQ ID NO: 29086 - RNA, 20 nt, Artificial Sequence
  HTT spacer sequence TTCN PAM
gcucuuguuaacccagccuc

SEQ ID NO: 29087 - RNA, 20 nt, Artificial Sequence
  HTT spacer sequence TTCN PAM
ugcccuucggcucuuguuaa

SEQ ID NO: 29088 - RNA, 20 nt, Artificial Sequence
  HTT spacer sequence TTCN PAM
cacaaaacaugccagugggg

SEQ ID NO: 29089 - RNA, 20 nt, Artificial Sequence
  HTT spacer sequence TTCN PAM
uucauaaagcacacacaccc

SEQ ID NO: 29090 - RNA, 20 nt, Artificial Sequence
  HTT spacer sequence TTCN PAM
uaaagcacacacacccagca

SEQ ID NO: 29091 - RNA, 20 nt, Artificial Sequence
  HTT spacer sequence TTCN PAM
cuuggcaaaggccaugucau

SEQ ID NO: 29092 - RNA, 20 nt, Artificial Sequence
  HTT spacer sequence TTCN PAM
aggcccagauuagcgaugac

SEQ ID NO: 29093 - RNA, 20 nt, Artificial Sequence
  HTT spacer sequence TTCN PAM
uguaaacauuccaggcccag

SEQ ID NO: 29094 - RNA, 20 nt, Artificial Sequence
  HTT spacer sequence TTCN PAM
uuauaaaucugccuuacuga

SEQ ID NO: 29095 - RNA, 20 nt, Artificial Sequence
  HTT spacer sequence TTCN PAM
ccuacaaagcggggggacaa

SEQ ID NO: 29096 - RNA, 20 nt, Artificial Sequence
  HTT spacer sequence TTCN PAM
uguccccccgcuuuguagga

SEQ ID NO: 29097 - RNA, 20 nt, Artificial Sequence
  HTT spacer sequence TTCN PAM
gagugggggcuauuaaccuu

SEQ ID NO: 29098 - RNA, 20 nt, Artificial Sequence
  HTT spacer sequence TTCN PAM
cggagugcaagguugagcau

SEQ ID NO: 29099 - RNA, 20 nt, Artificial Sequence
  HTT spacer sequence TTCN PAM
cauguggcugguuaccaugc

SEQ ID NO: 29100 - RNA, 20 nt, Artificial Sequence
  HTT spacer sequence TTCN PAM
uccucaaagauggaaaacac

SEQ ID NO: 29101 - RNA, 20 nt, Artificial Sequence
  HTT spacer sequence TTCN PAM
aucuuugaggaggaauugac

SEQ ID NO: 29102 - RNA, 20 nt, Artificial Sequence
  HTT spacer sequence TTCN PAM
uccugagugauauuaauaug

SEQ ID NO: 29103 - RNA, 20 nt, Artificial Sequence
  HTT spacer sequence TTCN PAM
uggccaucaccaaagagcau

SEQ ID NO: 29104 - RNA, 20 nt, Artificial Sequence
  HTT spacer sequence TTCN PAM
cggcaugggggagagggacc

SEQ ID NO: 29105 - RNA, 20 nt, Artificial Sequence
  HTT spacer sequence TTCN PAM
caccuccuagugaccaggaa

SEQ ID NO: 29106 - RNA, 20 nt, Artificial Sequence
  HTT spacer sequence TTCN PAM
uggucacuaggaggugagaa

SEQ ID NO: 29107 - RNA, 20 nt, Artificial Sequence
  HTT spacer sequence TTCN PAM
agccaggucaaucaauagaa

SEQ ID NO: 29108 - RNA, 20 nt, Artificial Sequence
  HTT spacer sequence TTCN PAM
auugauugaccuggcuggaa

SEQ ID NO: 29109 - RNA, 20 nt, Artificial Sequence
  HTT spacer sequence TTCN PAM
ugcuugguuaugacuuucua

SEQ ID NO: 29110 - RNA, 20 nt, Artificial Sequence
  HTT spacer sequence TTCN PAM
gaugaagacaccaaccaugc

SEQ ID NO: 29111 - RNA, 20 nt, Artificial Sequence
  HTT spacer sequence TTCN PAM
ucugaaacaaaagucucagu

SEQ ID NO: 29112 - RNA, 20 nt, Artificial Sequence
  HTT spacer sequence TTCN PAM
aaagcauaaacucucuugaa

SEQ ID NO: 29113 - RNA, 20 nt, Artificial Sequence
  HTT spacer sequence TTCN PAM
agagaguuuaugcuuuagaa

SEQ ID NO: 29114 - RNA, 20 nt, Artificial Sequence
  HTT spacer sequence TTCN PAM
uuaaagucuuuucaagagag

SEQ ID NO: 29115 - RNA, 20 nt, Artificial Sequence
  HTT spacer sequence TTCN PAM
ugccuuucuuuaaagucuuu

SEQ ID NO: 29116 - RNA, 20 nt, Artificial Sequence
  HTT spacer sequence TTCN PAM
ccaacaucaauaaagcagga

SEQ ID NO: 29117 - RNA, 20 nt, Artificial Sequence
  HTT spacer sequence TTCN PAM
ugcaccgucucuuccuggga

SEQ ID NO: 29118 - RNA, 20 nt, Artificial Sequence
  HTT spacer sequence TTCN PAM
ugggaguguucaaagucagg

SEQ ID NO: 29119 - RNA, 20 nt, Artificial Sequence
  HTT spacer sequence TTCN PAM
aagucaggauaauacuuaca

SEQ ID NO: 29120 - RNA, 20 nt, Artificial Sequence
  HTT spacer sequence TTCN PAM
gaucuuguaaguauuauccu

SEQ ID NO: 29121 - RNA, 20 nt, Artificial Sequence
  HTT spacer sequence TTCN PAM
ugguauaaaguguucagauc

SEQ ID NO: 29122 - RNA, 20 nt, Artificial Sequence
  HTT spacer sequence TTCN PAM
uaaucagucuuuuaaacacc

SEQ ID NO: 29123 - RNA, 20 nt, Artificial Sequence
  HTT spacer sequence TTCN PAM
cuuucuuaaucagucuuuua

SEQ ID NO: 29124 - RNA, 20 nt, Artificial Sequence
  HTT spacer sequence TTCN PAM
auucacuuucuuaaucaguc

SEQ ID NO: 29125 - RNA, 20 nt, Artificial Sequence
  HTT spacer sequence TTCN PAM
ccugccuuagccucccgagu

SEQ ID NO: 29126 - RNA, 20 nt, Artificial Sequence
  HTT spacer sequence TTCN PAM
aguaauucuccugccuuagc

SEQ ID NO: 29127 - RNA, 20 nt, Artificial Sequence
  HTT spacer sequence TTCN PAM
uuuuuuuuuuuuuugagaca

SEQ ID NO: 29128 - RNA, 20 nt, Artificial Sequence
  HTT spacer sequence TTCN PAM
uuucuuuuuuuuuuuuuuug

SEQ ID NO: 29129 - RNA, 20 nt, Artificial Sequence
  HTT spacer sequence TTCN PAM
uuucuuuucuuuuuuuuuuu

SEQ ID NO: 29130 - RNA, 20 nt, Artificial Sequence
  HTT spacer sequence TTCN PAM
cccacauuauccuccugagu

SEQ ID NO: 29131 - RNA, 20 nt, Artificial Sequence
  HTT spacer sequence TTCN PAM
agaccagccugggcaucaca

SEQ ID NO: 29132 - RNA, 20 nt, Artificial Sequence
  HTT spacer sequence TTCN PAM
ucucugaacuucccuaccuu

SEQ ID NO: 29133 - RNA, 20 nt, Artificial Sequence
  HTT spacer sequence TTCN PAM
gagaggaagcccuuuuagca

SEQ ID NO: 29134 - RNA, 20 nt, Artificial Sequence
  HTT spacer sequence TTCN PAM
cuaccuuucuucuguuuccc

SEQ ID NO: 29135 - RNA, 20 nt, Artificial Sequence
  HTT spacer sequence TTCN PAM
ucuguuucccugggcuaggg

SEQ ID NO: 29136 - RNA, 20 nt, Artificial Sequence
  HTT spacer sequence TTCN PAM
guuucccugggcuagggcuc

SEQ ID NO: 29137 - RNA, 20 nt, Artificial Sequence
  HTT spacer sequence TTCN PAM
cugggcuagggcuccauguu

SEQ ID NO: 29138 - RNA, 20 nt, Artificial Sequence
  HTT spacer sequence TTCN PAM
ugguccccgggucucccaau

SEQ ID NO: 29139 - RNA, 20 nt, Artificial Sequence
  HTT spacer sequence TTCN PAM
aggguagcucccucaacacc

SEQ ID NO: 29140 - RNA, 20 nt, Artificial Sequence
  HTT spacer sequence TTCN PAM
caagccaggagcgucucccu

SEQ ID NO: 29141 - RNA, 20 nt, Artificial Sequence
  HTT spacer sequence TTCN PAM
ggucucucagaucuacuggu

SEQ ID NO: 29142 - RNA, 20 nt, Artificial Sequence
  HTT spacer sequence TTCN PAM
cuacuuauuuuugauuuuaa

SEQ ID NO: 29143 - RNA, 20 nt, Artificial Sequence
  HTT spacer sequence TTCN PAM
uaaacuggcacuuggacuua

SEQ ID NO: 29144 - RNA, 20 nt, Artificial Sequence
  HTT spacer sequence TTCN PAM
aaacucaaguauaugucuca

SEQ ID NO: 29145 - RNA, 20 nt, Artificial Sequence
  HTT spacer sequence TTCN PAM
gccucugagcagaucuguuu

SEQ ID NO: 29146 - RNA, 20 nt, Artificial Sequence
  HTT spacer sequence TTCN PAM
gggugacccuaggcugcacc

SEQ ID NO: 29147 - RNA, 20 nt, Artificial Sequence
  HTT spacer sequence TTCN PAM
uucuggaagcgggguaaccu

SEQ ID NO: 29148 - RNA, 20 nt, Artificial Sequence
  HTT spacer sequence TTCN PAM
ggaagcgggguaaccuuccu

SEQ ID NO: 29149 - RNA, 20 nt, Artificial Sequence
  HTT spacer sequence TTCN PAM
agaaugaauacauuuaucca

SEQ ID NO: 29150 - RNA, 20 nt, Artificial Sequence
  HTT spacer sequence TTCN PAM
uuaccaguuccgccaggacc

SEQ ID NO: 29151 - RNA, 20 nt, Artificial Sequence
  HTT spacer sequence TTCN PAM
gccaggaccugucgaauagu

SEQ ID NO: 29152 - RNA, 20 nt, Artificial Sequence
  HTT spacer sequence TTCN PAM
acagguccuggcggaacugg

SEQ ID NO: 29153 - RNA, 20 nt, Artificial Sequence
  HTT spacer sequence TTCN PAM
uauauuacagguacagagcu

SEQ ID NO: 29154 - RNA, 20 nt, Artificial Sequence
  HTT spacer sequence TTCN PAM
gacggcuaccucuggauccu

SEQ ID NO: 29155 - RNA, 20 nt, Artificial Sequence
  HTT spacer sequence TTCN PAM
cugauguucugacggcuacc

SEQ ID NO: 29156 - RNA, 20 nt, Artificial Sequence
  HTT spacer sequence TTCN PAM
caguagcugggaccacaggc

SEQ ID NO: 29157 - RNA, 20 nt, Artificial Sequence
  HTT spacer sequence TTCN PAM
agugauccuccuugcucagc

SEQ ID NO: 29158 - RNA, 20 nt, Artificial Sequence
  HTT spacer sequence TTCN PAM
aggcaagccugggcaacaua

SEQ ID NO: 29159 - RNA, 20 nt, Artificial Sequence
  HTT spacer sequence TTCN PAM
ucaaaaaagaaaaaaagacu

SEQ ID NO: 29160 - RNA, 20 nt, Artificial Sequence
  HTT spacer sequence TTCN PAM
aaaaagaaaaaaagacugga

SEQ ID NO: 29161 - RNA, 20 nt, Artificial Sequence
  HTT spacer sequence TTCN PAM
uuuuugaagaagacaggguc

SEQ ID NO: 29162 - RNA, 20 nt, Artificial Sequence
  HTT spacer sequence TTCN PAM
agucuuuuuuucuuuuuuga

SEQ ID NO: 29163 - RNA, 20 nt, Artificial Sequence
  HTT spacer sequence TTCN PAM
uccaacuuucgaaggaauuc

SEQ ID NO: 29164 - RNA, 20 nt, Artificial Sequence
  HTT spacer sequence TTCN PAM
aacuuucgaaggaauucaaa

SEQ ID NO: 29165 - RNA, 20 nt, Artificial Sequence
  HTT spacer sequence TTCN PAM
aaggaauucaaagccccuga

SEQ ID NO: 29166 - RNA, 20 nt, Artificial Sequence
  HTT spacer sequence TTCN PAM
aaaguuggaagaaugugcac

SEQ ID NO: 29167 - RNA, 20 nt, Artificial Sequence
  HTT spacer sequence TTCN PAM
uucgaaaguuggaagaaugu

SEQ ID NO: 29168 - RNA, 20 nt, Artificial Sequence
  HTT spacer sequence TTCN PAM
aagccccugaaaaaugaagg

SEQ ID NO: 29169 - RNA, 20 nt, Artificial Sequence
  HTT spacer sequence TTCN PAM
ggggcuuugaauuccuucga

SEQ ID NO: 29170 - RNA, 20 nt, Artificial Sequence
  HTT spacer sequence TTCN PAM
uuuuucaggggcuuugaauu

SEQ ID NO: 29171 - RNA, 20 nt, Artificial Sequence
  HTT spacer sequence TTCN PAM
cuucauuuuucaggggcuuu

SEQ ID NO: 29172 - RNA, 20 nt, Artificial Sequence
  HTT spacer sequence TTCN PAM
uuucccuucauuuuucaggg

SEQ ID NO: 29173 - RNA, 20 nt, Artificial Sequence
  HTT spacer sequence TTCN PAM
ucucauuugauuaguuuccc

SEQ ID NO: 29174 - RNA, 20 nt, Artificial Sequence
  HTT spacer sequence TTCN PAM
cucaaaaugaacuuucauuu

SEQ ID NO: 29175 - RNA, 20 nt, Artificial Sequence
  HTT spacer sequence TTCN PAM
uuuugagggaaacuaaucaa

SEQ ID NO: 29176 - RNA, 20 nt, Artificial Sequence
  HTT spacer sequence TTCN PAM
uuuuuggcauugcauagccu

SEQ ID NO: 29177 - RNA, 20 nt, Artificial Sequence
  HTT spacer sequence TTCN PAM
aggcuaugcaaugccaaaaa

SEQ ID NO: 29178 - RNA, 20 nt, Artificial Sequence
  HTT spacer sequence TTCN PAM
aaagagggagcaguucacau

SEQ ID NO: 29179 - RNA, 20 nt, Artificial Sequence
  HTT spacer sequence TTCN PAM
cugggugugguggugggcgc

SEQ ID NO: 29180 - RNA, 20 nt, Artificial Sequence
  HTT spacer sequence TTCN PAM
ccguguuagccggguggucu

SEQ ID NO: 29181 - RNA, 20 nt, Artificial Sequence
  HTT spacer sequence TTCN PAM
aucucaaaaaaaaaaaaaca

SEQ ID NO: 29182 - RNA, 20 nt, Artificial Sequence
  HTT spacer sequence TTCN PAM
gggagccgagaucaggccau

SEQ ID NO: 29183 - RNA, 20 nt, Artificial Sequence
  HTT spacer sequence TTCN PAM
ggcgauuccccugucucagc

SEQ ID NO: 29184 - RNA, 20 nt, Artificial Sequence
  HTT spacer sequence TTCN PAM
ccugucucagccucccgagu

SEQ ID NO: 29185 - RNA, 20 nt, Artificial Sequence
  HTT spacer sequence TTCN PAM
ccauguuggucgggcugguc

SEQ ID NO: 29186 - RNA, 20 nt, Artificial Sequence
  HTT spacer sequence TTCN PAM
agaccagcccgaccaacaug

SEQ ID NO: 29187 - RNA, 20 nt, Artificial Sequence
  HTT spacer sequence TTCN PAM
agcaauuaucccugccucag

SEQ ID NO: 29188 - RNA, 20 nt, Artificial Sequence
  HTT spacer sequence TTCN PAM
acuauuuaaaaauuauuuau

SEQ ID NO: 29189 - RNA, 20 nt, Artificial Sequence
  HTT spacer sequence TTCN PAM
gccucccaaagugcugagau

SEQ ID NO: 29190 - RNA, 20 nt, Artificial Sequence
  HTT spacer sequence TTCN PAM
ugacaagccugaucaacaua

SEQ ID NO: 29191 - RNA, 20 nt, Artificial Sequence
  HTT spacer sequence TTCN PAM
cuauguugaucaggcuuguc

SEQ ID NO: 29192 - RNA, 20 nt, Artificial Sequence
  HTT spacer sequence TTCN PAM
ccaguagcuaggauuacugg

SEQ ID NO: 29193 - RNA, 20 nt, Artificial Sequence
  HTT spacer sequence TTCN PAM
ccugccucagauuccccagu

SEQ ID NO: 29194 - RNA, 20 nt, Artificial Sequence
  HTT spacer sequence TTCN PAM
agugauucuccugccucaga

SEQ ID NO: 29195 - RNA, 20 nt, Artificial Sequence
  HTT spacer sequence TTCN PAM
acuauauauauauauauuuu

SEQ ID NO: 29196 - RNA, 20 nt, Artificial Sequence
  HTT spacer sequence TTCN PAM
uuuaugcuuuagugcuuuug

SEQ ID NO: 29197 - RNA, 20 nt, Artificial Sequence
  HTT spacer sequence TTCN PAM
agacaccaaaagcacuaaag

SEQ ID NO: 29198 - RNA, 20 nt, Artificial Sequence
  HTT spacer sequence TTCN PAM
cuuuacccaaggucaugagg

SEQ ID NO: 29199 - RNA, 20 nt, Artificial Sequence
  HTT spacer sequence TTCN PAM
cauuuaggucuauaauuaaa

SEQ ID NO: 29200 - RNA, 20 nt, Artificial Sequence
  HTT spacer sequence TTCN PAM
uuaauuauagaccuaaaugu

SEQ ID NO: 29201 - RNA, 20 nt, Artificial Sequence
  HTT spacer sequence TTCN PAM
ccccgguuuggguaucuagu

SEQ ID NO: 29202 - RNA, 20 nt, Artificial Sequence
  HTT spacer sequence TTCN PAM
guauuaacuucaauuuaaaa

SEQ ID NO: 29203 - RNA, 20 nt, Artificial Sequence
  HTT spacer sequence TTCN PAM
auuuaaaaggccauucuuuc

SEQ ID NO: 29204 - RNA, 20 nt, Artificial Sequence
  HTT spacer sequence TTCN PAM
uuccauaguauuguagaaug

SEQ ID NO: 29205 - RNA, 20 nt, Artificial Sequence
  HTT spacer sequence TTCN PAM
auaguauuguagaaugccau

SEQ ID NO: 29206 - RNA, 20 nt, Artificial Sequence
  HTT spacer sequence TTCN PAM
acaauacuauggaaagaaug

SEQ ID NO: 29207 - RNA, 20 nt, Artificial Sequence
  HTT spacer sequence TTCN PAM
uaccuugguuauaaauuuag

SEQ ID NO: 29208 - RNA, 20 nt, Artificial Sequence
  HTT spacer sequence TTCN PAM
auauuccuucgucuacuuuu

SEQ ID NO: 29209 - RNA, 20 nt, Artificial Sequence
  HTT spacer sequence TTCN PAM
uucgucuacuuuucuauccu

SEQ ID NO: 29210 - RNA, 20 nt, Artificial Sequence
  HTT spacer sequence TTCN PAM
ucuacuuuucuauccuugag

SEQ ID NO: 29211 - RNA, 20 nt, Artificial Sequence
  HTT spacer sequence TTCN PAM
auccuugagcggccaguacc

SEQ ID NO: 29212 - RNA, 20 nt, Artificial Sequence
  HTT spacer sequence TTCN PAM
gagagugugguacuggccgc

SEQ ID NO: 29213 - RNA, 20 nt, Artificial Sequence
  HTT spacer sequence TTCN PAM
caacaacaacaaaugcuaua

SEQ ID NO: 29214 - RNA, 20 nt, Artificial Sequence
  HTT spacer sequence TTCN PAM
agccugggcaacagagcaag

SEQ ID NO: 29215 - RNA, 20 nt, Artificial Sequence
  HTT spacer sequence TTCN PAM
caccucagccuccugagugg

SEQ ID NO: 29216 - RNA, 20 nt, Artificial Sequence
  HTT spacer sequence TTCN PAM
agaccgccugagcaacagag

SEQ ID NO: 29217 - RNA, 20 nt, Artificial Sequence
  HTT spacer sequence TTCN PAM
cccaagccucccaaagugcu

SEQ ID NO: 29218 - RNA, 20 nt, Artificial Sequence
  HTT spacer sequence TTCN PAM
guauuguucuucaugaaugu

SEQ ID NO: 29219 - RNA, 20 nt, Artificial Sequence
  HTT spacer sequence TTCN PAM
ucaugaauguuuugguuauu

SEQ ID NO: 29220 - RNA, 20 nt, Artificial Sequence
  HTT spacer sequence TTCN PAM
ugaauguuuugguuauucuu

SEQ ID NO: 29221 - RNA, 20 nt, Artificial Sequence
  HTT spacer sequence TTCN PAM
ugaagaacaauacagaacgc

SEQ ID NO: 29222 - RNA, 20 nt, Artificial Sequence
  HTT spacer sequence TTCN PAM
uggcccuuuauaauuuuaug

SEQ ID NO: 29223 - RNA, 20 nt, Artificial Sequence
  HTT spacer sequence TTCN PAM
cauaaagcacauaaaauuau

SEQ ID NO: 29224 - RNA, 20 nt, Artificial Sequence
  HTT spacer sequence TTCN PAM
guaucuuaguccguuugugu

SEQ ID NO: 29225 - RNA, 20 nt, Artificial Sequence
  HTT spacer sequence TTCN PAM
uuauagcaacacaaacggac

SEQ ID NO: 29226 - RNA, 20 nt, Artificial Sequence
  HTT spacer sequence TTCN PAM
gcaagcuguguaagaagcau

SEQ ID NO: 29227 - RNA, 20 nt, Artificial Sequence
  HTT spacer sequence TTCN PAM
uacacagcuugcagaaccag

SEQ ID NO: 29228 - RNA, 20 nt, Artificial Sequence
  HTT spacer sequence TTCN PAM
acuuacggcacaaggugaag

SEQ ID NO: 29229 - RNA, 20 nt, Artificial Sequence
  HTT spacer sequence TTCN PAM
ccuugugccguaaguggaaa

SEQ ID NO: 29230 - RNA, 20 nt, Artificial Sequence
  HTT spacer sequence TTCN PAM
cucaucaugucaucuggaca

SEQ ID NO: 29231 - RNA, 20 nt, Artificial Sequence
  HTT spacer sequence TTCN PAM
caucucucuugcuuuuucuc

SEQ ID NO: 29232 - RNA, 20 nt, Artificial Sequence
  HTT spacer sequence TTCN PAM
cugagagcuagcuguuaaaa

SEQ ID NO: 29233 - RNA, 20 nt, Artificial Sequence
  HTT spacer sequence TTCN PAM
auuaguucccugagagcuag

SEQ ID NO: 29234 - RNA, 20 nt, Artificial Sequence
  HTT spacer sequence TTCN PAM
cauuccauuaguucccugag

SEQ ID NO: 29235 - RNA, 20 nt, Artificial Sequence
  HTT spacer sequence TTCN PAM
agcacugagugaguucucau

SEQ ID NO: 29236 - RNA, 20 nt, Artificial Sequence
  HTT spacer sequence TTCN PAM
ugagggaccugcccucauga

SEQ ID NO: 29237 - RNA, 20 nt, Artificial Sequence
  HTT spacer sequence TTCN PAM
cauuaggcccaccuccagca

SEQ ID NO: 29238 - RNA, 20 nt, Artificial Sequence
  HTT spacer sequence TTCN PAM
ccucagacuccugagcagcu

SEQ ID NO: 29239 - RNA, 20 nt, Artificial Sequence
  HTT spacer sequence TTCN PAM
gggcucaagcgauccuuuca

SEQ ID NO: 29240 - RNA, 20 nt, Artificial Sequence
  HTT spacer sequence TTCN PAM
agacuagccuggcgaccuag

SEQ ID NO: 29241 - RNA, 20 nt, Artificial Sequence
  HTT spacer sequence TTCN PAM
agcuacuuggcagacugagg

SEQ ID NO: 29242 - RNA, 20 nt, Artificial Sequence
  HTT spacer sequence TTCN PAM
uuuauuuacauauuuugaga

SEQ ID NO: 29243 - RNA, 20 nt, Artificial Sequence
  HTT spacer sequence TTCN PAM
uuuucuuuuauuuacauauu

SEQ ID NO: 29244 - RNA, 20 nt, Artificial Sequence
  HTT spacer sequence TTCN PAM
aaauuuuuuucuuuuucuuu

SEQ ID NO: 29245 - RNA, 20 nt, Artificial Sequence
  HTT spacer sequence TTCN PAM
uuucaaaauuuuuuucuuuu

SEQ ID NO: 29246 - RNA, 20 nt, Artificial Sequence
  HTT spacer sequence TTCN PAM
gaguuguccaccccagcucu

SEQ ID NO: 29247 - RNA, 20 nt, Artificial Sequence
  HTT spacer sequence TTCN PAM
uucagaguuguccaccccag

SEQ ID NO: 29248 - RNA, 20 nt, Artificial Sequence
  HTT spacer sequence TTCN PAM
cugaaaaggaaggaaaagau

SEQ ID NO: 29249 - RNA, 20 nt, Artificial Sequence
  HTT spacer sequence TTCN PAM
gugaauuccuucagaguugu

SEQ ID NO: 29250 - RNA, 20 nt, Artificial Sequence
  HTT spacer sequence TTCN PAM
uuuucagugaauuccuucag

SEQ ID NO: 29251 - RNA, 20 nt, Artificial Sequence
  HTT spacer sequence TTCN PAM
uuccuuuucagugaauuccu

SEQ ID NO: 29252 - RNA, 20 nt, Artificial Sequence
  HTT spacer sequence TTCN PAM
cucacugccuaucuuuuccu

SEQ ID NO: 29253 - RNA, 20 nt, Artificial Sequence
  HTT spacer sequence TTCN PAM
gccccagcuucucucacugc

SEQ ID NO: 29254 - RNA, 20 nt, Artificial Sequence
  HTT spacer sequence TTCN PAM
ucagagugggagacagcaua

SEQ ID NO: 29255 - RNA, 20 nt, Artificial Sequence
  HTT spacer sequence TTCN PAM
gagugggagacagcauauuu

SEQ ID NO: 29256 - RNA, 20 nt, Artificial Sequence
  HTT spacer sequence TTCN PAM
auuaggaugcaaauaugcug

SEQ ID NO: 29257 - RNA, 20 nt, Artificial Sequence
  HTT spacer sequence TTCN PAM
ugcaucacuuccauuaggau

SEQ ID NO: 29258 - RNA, 20 nt, Artificial Sequence
  HTT spacer sequence TTCN PAM
uuccugcaucacuuccauua

SEQ ID NO: 29259 - RNA, 20 nt, Artificial Sequence
  HTT spacer sequence TTCN PAM
cuuucuuuccugcaucacuu

SEQ ID NO: 29260 - RNA, 20 nt, Artificial Sequence
  HTT spacer sequence TTCN PAM
cauaucaucacuuucucuuu

SEQ ID NO: 29261 - RNA, 20 nt, Artificial Sequence
  HTT spacer sequence TTCN PAM
guccucuucucauaucauca

SEQ ID NO: 29262 - RNA, 20 nt, Artificial Sequence
  HTT spacer sequence TTCN PAM
caaccagaccccacccuguc

SEQ ID NO: 29263 - RNA, 20 nt, Artificial Sequence
  HTT spacer sequence TTCN PAM
cagcucccacacauccgcag

SEQ ID NO: 29264 - RNA, 20 nt, Artificial Sequence
  HTT spacer sequence TTCN PAM
aaaagauugcuggugcucac

SEQ ID NO: 29265 - RNA, 20 nt, Artificial Sequence
  HTT spacer sequence TTCN PAM
cagacugcugaggguggugu

SEQ ID NO: 29266 - RNA, 20 nt, Artificial Sequence
  HTT spacer sequence TTCN PAM
uuuauacuccucagcacaga

SEQ ID NO: 29267 - RNA, 20 nt, Artificial Sequence
  HTT spacer sequence TTCN PAM
ucccuccugggcacccugcu

SEQ ID NO: 29268 - RNA, 20 nt, Artificial Sequence
  HTT spacer sequence TTCN PAM
cuccugggcacccugcuccg

SEQ ID NO: 29269 - RNA, 20 nt, Artificial Sequence
  HTT spacer sequence TTCN PAM
ucucaacuuccaucauuagg

SEQ ID NO: 29270 - RNA, 20 nt, Artificial Sequence
  HTT spacer sequence TTCN PAM
aucauuaggcucagggaccu

SEQ ID NO: 29271 - RNA, 20 nt, Artificial Sequence
  HTT spacer sequence TTCN PAM
cuguguccugccgugaaagu

SEQ ID NO: 29272 - RNA, 20 nt, Artificial Sequence
  HTT spacer sequence TTCN PAM
cggcaggacacagggaaagg

SEQ ID NO: 29273 - RNA, 20 nt, Artificial Sequence
  HTT spacer sequence TTCN PAM
ggugccucuuuaccuuaagu

SEQ ID NO: 29274 - RNA, 20 nt, Artificial Sequence
  HTT spacer sequence TTCN PAM
cauaauacaauguugauaaa

SEQ ID NO: 29275 - RNA, 20 nt, Artificial Sequence
  HTT spacer sequence TTCN PAM
auaaaaaagcaaguauugcc

SEQ ID NO: 29276 - RNA, 20 nt, Artificial Sequence
  HTT spacer sequence TTCN PAM
ggucacuuaauuuugagaug

SEQ ID NO: 29277 - RNA, 20 nt, Artificial Sequence
  HTT spacer sequence TTCN PAM
auguguugucucugaauaaa

SEQ ID NO: 29278 - RNA, 20 nt, Artificial Sequence
  HTT spacer sequence TTCN PAM
gagacaacacauggaauagg

SEQ ID NO: 29279 - RNA, 20 nt, Artificial Sequence
  HTT spacer sequence TTCN PAM
gccucuguucuauuuaagua

SEQ ID NO: 29280 - RNA, 20 nt, Artificial Sequence
  HTT spacer sequence TTCN PAM
auuuaaguaguuuuauuuuu

SEQ ID NO: 29281 - RNA, 20 nt, Artificial Sequence
  HTT spacer sequence TTCN PAM
cucuggucauuucuggguau

SEQ ID NO: 29282 - RNA, 20 nt, Artificial Sequence
  HTT spacer sequence TTCN PAM
ggguauugcuguaaagacug

SEQ ID NO: 29283 - RNA, 20 nt, Artificial Sequence
  HTT spacer sequence TTCN PAM
ggaccuucagagauugaagg

SEQ ID NO: 29284 - RNA, 20 nt, Artificial Sequence
  HTT spacer sequence TTCN PAM
gagauugaaggguuacaaac

SEQ ID NO: 29285 - RNA, 20 nt, Artificial Sequence
  HTT spacer sequence TTCN PAM
aucucugaagguccugaaaa

SEQ ID NO: 29286 - RNA, 20 nt, Artificial Sequence
  HTT spacer sequence TTCN PAM
cacacugcaguuuguaaccc

SEQ ID NO: 29287 - RNA, 20 nt, Artificial Sequence
  HTT spacer sequence TTCN PAM
uugccaaucuuuaaaguaaa

SEQ ID NO: 29288 - RNA, 20 nt, Artificial Sequence
  HTT spacer sequence TTCN PAM
aacauaccguucuuugccaa

SEQ ID NO: 29289 - RNA, 20 nt, Artificial Sequence
  HTT spacer sequence TTCN PAM
agcuguuuugcccuuuugcu

SEQ ID NO: 29290 - RNA, 20 nt, Artificial Sequence
  HTT spacer sequence TTCN PAM
ggcuccauacagcaaaaggg

SEQ ID NO: 29291 - RNA, 20 nt, Artificial Sequence
  HTT spacer sequence TTCN PAM
agucucuacauucaggcucc

SEQ ID NO: 29292 - RNA, 20 nt, Artificial Sequence
  HTT spacer sequence TTCN PAM
uaucccugcucugucauggg

SEQ ID NO: 29293 - RNA, 20 nt, Artificial Sequence
  HTT spacer sequence TTCN PAM
gaggcuggcucagauauuug

SEQ ID NO: 29294 - RNA, 20 nt, Artificial Sequence
  HTT spacer sequence TTCN PAM
ucuggauaaguagcaucaaa

SEQ ID NO: 29295 - RNA, 20 nt, Artificial Sequence
  HTT spacer sequence TTCN PAM
ggauaaguagcaucaaaaca

SEQ ID NO: 29296 - RNA, 20 nt, Artificial Sequence
  HTT spacer sequence TTCN PAM
uauacaaauguaguugccgu

SEQ ID NO: 29297 - RNA, 20 nt, Artificial Sequence
  HTT spacer sequence TTCN PAM
ccauguaauguuacuaaugu

SEQ ID NO: 29298 - RNA, 20 nt, Artificial Sequence
  HTT spacer sequence TTCN PAM
agcaaauaccacuaugccuu

SEQ ID NO: 29299 - RNA, 20 nt, Artificial Sequence
  HTT spacer sequence TTCN PAM
uuaaugccuuaaaaccaucu

SEQ ID NO: 29300 - RNA, 20 nt, Artificial Sequence
  HTT spacer sequence TTCN PAM
acagauguaaauaagauggu

SEQ ID NO: 29301 - RNA, 20 nt, Artificial Sequence
  HTT spacer sequence TTCN PAM
ggagcaaucauuaaaaacag

SEQ ID NO: 29302 - RNA, 20 nt, Artificial Sequence
  HTT spacer sequence TTCN PAM
uuagguuuucucuguuuauu

SEQ ID NO: 29303 - RNA, 20 nt, Artificial Sequence
  HTT spacer sequence TTCN PAM
cuguuuauucuaauauguaa

SEQ ID NO: 29304 - RNA, 20 nt, Artificial Sequence
  HTT spacer sequence TTCN PAM
aauauguaaacugaaauuaa

SEQ ID NO: 29305 - RNA, 20 nt, Artificial Sequence
  HTT spacer sequence TTCN PAM
guuuacauauuagaauaaac

SEQ ID NO: 29306 - RNA, 20 nt, Artificial Sequence
  HTT spacer sequence TTCN PAM
gaguucauucuuuaaaaaaa

SEQ ID NO: 29307 - RNA, 20 nt, Artificial Sequence
  HTT spacer sequence TTCN PAM
uucuuuaaaaaaaguaaguc

SEQ ID NO: 29308 - RNA, 20 nt, Artificial Sequence
  HTT spacer sequence TTCN PAM
uuaaaaaaaguaaguccuaa

SEQ ID NO: 29309 - RNA, 20 nt, Artificial Sequence
  HTT spacer sequence TTCN PAM
uuaggacuuacuuuuuuuaa

SEQ ID NO: 29310 - RNA, 20 nt, Artificial Sequence
  HTT spacer sequence TTCN PAM
acauuauuacagcauccuuu

SEQ ID NO: 29311 - RNA, 20 nt, Artificial Sequence
  HTT spacer sequence TTCN PAM
acagugacugauucuacauu

SEQ ID NO: 29312 - RNA, 20 nt, Artificial Sequence
  HTT spacer sequence TTCN PAM
auggaacagccuugaaauua

SEQ ID NO: 29313 - RNA, 20 nt, Artificial Sequence
  HTT spacer sequence TTCN PAM
auggaaacucaauaaaauuc

SEQ ID NO: 29314 - RNA, 20 nt, Artificial Sequence
  HTT spacer sequence TTCN PAM
aggcuguuccauggaaacuc

SEQ ID NO: 29315 - RNA, 20 nt, Artificial Sequence
  HTT spacer sequence TTCN PAM
guaaucuuacagaguaaaua

SEQ ID NO: 29316 - RNA, 20 nt, Artificial Sequence
  HTT spacer sequence TTCN PAM
cagugguuacaaagagauug

SEQ ID NO: 29317 - RNA, 20 nt, Artificial Sequence
  HTT spacer sequence TTCN PAM
cugagcaaaaggcauugccu

SEQ ID NO: 29318 - RNA, 20 nt, Artificial Sequence
  HTT spacer sequence TTCN PAM
caaagcauaugcagguucuc

SEQ ID NO: 29319 - RNA, 20 nt, Artificial Sequence
  HTT spacer sequence TTCN PAM
ggaaagaaagggugaaaagg

SEQ ID NO: 29320 - RNA, 20 nt, Artificial Sequence
  HTT spacer sequence TTCN PAM
ugaacucagcuuucccaaag

SEQ ID NO: 29321 - RNA, 20 nt, Artificial Sequence
  HTT spacer sequence TTCN PAM
uuccugaacucagcuuuccc

SEQ ID NO: 29322 - RNA, 20 nt, Artificial Sequence
  HTT spacer sequence TTCN PAM
cccuuucuuuccugaacuca

SEQ ID NO: 29323 - RNA, 20 nt, Artificial Sequence
  HTT spacer sequence TTCN PAM
cuggacuugagugcagguag

SEQ ID NO: 29324 - RNA, 20 nt, Artificial Sequence
  HTT spacer sequence TTCN PAM
ugaccucgugaucugccuac

SEQ ID NO: 29325 - RNA, 20 nt, Artificial Sequence
  HTT spacer sequence TTCN PAM
ucacgucggucaggcugauc

SEQ ID NO: 29326 - RNA, 20 nt, Artificial Sequence
  HTT spacer sequence TTCN PAM
ccugccucagccuccugagu

SEQ ID NO: 29327 - RNA, 20 nt, Artificial Sequence
  HTT spacer sequence TTCN PAM
agcaauucuccugccucagc

SEQ ID NO: 29328 - RNA, 20 nt, Artificial Sequence
  HTT spacer sequence TTCN PAM
uuuuuuuuuuuuuugagaca

SEQ ID NO: 29329 - RNA, 20 nt, Artificial Sequence
  HTT spacer sequence TTCN PAM
uucuuuuuuuuuuuuuuuga

SEQ ID NO: 29330 - RNA, 20 nt, Artificial Sequence
  HTT spacer sequence TTCN PAM
uucuuucuuuuuuuuuuuuu

SEQ ID NO: 29331 - RNA, 20 nt, Artificial Sequence
  HTT spacer sequence TTCN PAM
gcauuuuuauauaugauccu

SEQ ID NO: 29332 - RNA, 20 nt, Artificial Sequence
  HTT spacer sequence TTCN PAM
ccacguuggccaggaugguc

SEQ ID NO: 29333 - RNA, 20 nt, Artificial Sequence
  HTT spacer sequence TTCN PAM
aaugauccuccugccucagc

SEQ ID NO: 29334 - RNA, 20 nt, Artificial Sequence
  HTT spacer sequence TTCN PAM
agccuggugacagagcgaga

SEQ ID NO: 29335 - RNA, 20 nt, Artificial Sequence
  HTT spacer sequence TTCN PAM
guuuuuuaauuuuguuuugu

SEQ ID NO: 29336 - RNA, 20 nt, Artificial Sequence
  HTT spacer sequence TTCN PAM
guucccuuagcauuuacugg

SEQ ID NO: 29337 - RNA, 20 nt, Artificial Sequence
  HTT spacer sequence TTCN PAM
cuuagcauuuacugggcgcc

SEQ ID NO: 29338 - RNA, 20 nt, Artificial Sequence
  HTT spacer sequence TTCN PAM
uaauguugagugucuaaugg

SEQ ID NO: 29339 - RNA, 20 nt, Artificial Sequence
  HTT spacer sequence TTCN PAM
cauuagacacucaacauuau

SEQ ID NO: 29340 - RNA, 20 nt, Artificial Sequence
  HTT spacer sequence TTCN PAM
cauguccaucuucccauuag

SEQ ID NO: 29341 - RNA, 20 nt, Artificial Sequence
  HTT spacer sequence TTCN PAM
uuauacuacaaaauuaucuu

SEQ ID NO: 29342 - RNA, 20 nt, Artificial Sequence
  HTT spacer sequence TTCN PAM
uauagacuaucauauauuca

SEQ ID NO: 29343 - RNA, 20 nt, Artificial Sequence
  HTT spacer sequence TTCN PAM
acacuuccuauagacuauca

SEQ ID NO: 29344 - RNA, 20 nt, Artificial Sequence
  HTT spacer sequence TTCN PAM
ccauguuagccaggaugguc

SEQ ID NO: 29345 - RNA, 20 nt, Artificial Sequence
  HTT spacer sequence TTCN PAM
ccugccucagccuaccaagu

SEQ ID NO: 29346 - RNA, 20 nt, Artificial Sequence
  HTT spacer sequence TTCN PAM
agugauucuccugccucagc

SEQ ID NO: 29347 - RNA, 20 nt, Artificial Sequence
  HTT spacer sequence TTCN PAM
acacucuuuuuuuuuuuuug

SEQ ID NO: 29348 - RNA, 20 nt, Artificial Sequence
  HTT spacer sequence TTCN PAM
cagaauaaaaaaguuaccau

SEQ ID NO: 29349 - RNA, 20 nt, Artificial Sequence
  HTT spacer sequence TTCN PAM
gugaauuuugcucccuaccc

SEQ ID NO: 29350 - RNA, 20 nt, Artificial Sequence
  HTT spacer sequence TTCN PAM
aaccccacuaugguaacuuu

SEQ ID NO: 29351 - RNA, 20 nt, Artificial Sequence
  HTT spacer sequence TTCN PAM
uuuacaagacaacugcgagg

SEQ ID NO: 29352 - RNA, 20 nt, Artificial Sequence
  HTT spacer sequence TTCN PAM
cuaaaacaccaaucuccccg

SEQ ID NO: 29353 - RNA, 20 nt, Artificial Sequence
  HTT spacer sequence TTCN PAM
uacuugcugcuugcuucccu

SEQ ID NO: 29354 - RNA, 20 nt, Artificial Sequence
  HTT spacer sequence TTCN PAM
ugccuucauacuugcugcuu

SEQ ID NO: 29355 - RNA, 20 nt, Artificial Sequence
  HTT spacer sequence TTCN PAM
acacucccgccccaaccaac

SEQ ID NO: 29356 - RNA, 20 nt, Artificial Sequence
  HTT spacer sequence TTCN PAM
agugggugauuuugcaagaa

SEQ ID NO: 29357 - RNA, 20 nt, Artificial Sequence
  HTT spacer sequence TTCN PAM
ugcaaaaucacccacuugaa

SEQ ID NO: 29358 - RNA, 20 nt, Artificial Sequence
  HTT spacer sequence TTCN PAM
ugcugccuaaaaagaucaag

SEQ ID NO: 29359 - RNA, 20 nt, Artificial Sequence
  HTT spacer sequence TTCN PAM
auuguuccugcugccuaaaa

SEQ ID NO: 29360 - RNA, 20 nt, Artificial Sequence
  HTT spacer sequence TTCN PAM
cugccuuaaacccuucgauu

SEQ ID NO: 29361 - RNA, 20 nt, Artificial Sequence
  HTT spacer sequence TTCN PAM
ggucauagguacagugugag

SEQ ID NO: 29362 - RNA, 20 nt, Artificial Sequence
  HTT spacer sequence TTCN PAM
gggcugucugcuccccacau

SEQ ID NO: 29363 - RNA, 20 nt, Artificial Sequence
  HTT spacer sequence TTCN PAM
uagggcggucuaaucugggu

SEQ ID NO: 29364 - RNA, 20 nt, Artificial Sequence
  HTT spacer sequence TTCN PAM
ucauguuuauaagaaguuua

SEQ ID NO: 29365 - RNA, 20 nt, Artificial Sequence
  HTT spacer sequence TTCN PAM
uguuuauaagaaguuuaucu

SEQ ID NO: 29366 - RNA, 20 nt, Artificial Sequence
  HTT spacer sequence TTCN PAM
uauaaacaugaagaaaaaag

SEQ ID NO: 29367 - RNA, 20 nt, Artificial Sequence
  HTT spacer sequence TTCN PAM
uguuuaauuuggaauuucau

SEQ ID NO: 29368 - RNA, 20 nt, Artificial Sequence
  HTT spacer sequence TTCN PAM
aaauuaaacaugaaaaccca

SEQ ID NO: 29369 - RNA, 20 nt, Artificial Sequence
  HTT spacer sequence TTCN PAM
uuuuggaaacaaauuucaaa

SEQ ID NO: 29370 - RNA, 20 nt, Artificial Sequence
  HTT spacer sequence TTCN PAM
aaaaugaaauuccaaauuaa

SEQ ID NO: 29371 - RNA, 20 nt, Artificial Sequence
  HTT spacer sequence TTCN PAM
aaacuagaauauaagccuag

SEQ ID NO: 29372 - RNA, 20 nt, Artificial Sequence
  HTT spacer sequence TTCN PAM
aguuuugaaauuuguuucca

SEQ ID NO: 29373 - RNA, 20 nt, Artificial Sequence
  HTT spacer sequence TTCN PAM
ugcuaggcuuauauucuagu

SEQ ID NO: 29374 - RNA, 20 nt, Artificial Sequence
  HTT spacer sequence TTCN PAM
accacccagugacuguggcc

SEQ ID NO: 29375 - RNA, 20 nt, Artificial Sequence
  HTT spacer sequence TTCN PAM
gaaaagguaaaauacaucau

SEQ ID NO: 29376 - RNA, 20 nt, Artificial Sequence
  HTT spacer sequence TTCN PAM
gaauaaacugauuuucuacc

SEQ ID NO: 29377 - RNA, 20 nt, Artificial Sequence
  HTT spacer sequence TTCN PAM
accaucuaugauguauuuua

SEQ ID NO: 29378 - RNA, 20 nt, Artificial Sequence
  HTT spacer sequence TTCN PAM
caaaguguuuucagcaauac

SEQ ID NO: 29379 - RNA, 20 nt, Artificial Sequence
  HTT spacer sequence TTCN PAM
gcaauacugccaucuuagcc

SEQ ID NO: 29380 - RNA, 20 nt, Artificial Sequence
  HTT spacer sequence TTCN PAM
ccuaugcaaaaauuucuggg

SEQ ID NO: 29381 - RNA, 20 nt, Artificial Sequence
  HTT spacer sequence TTCN PAM
ggguuaucuuggucccuuac

SEQ ID NO: 29382 - RNA, 20 nt, Artificial Sequence
  HTT spacer sequence TTCN PAM
ucuauguguuuguaggauuu

SEQ ID NO: 29383 - RNA, 20 nt, Artificial Sequence
  HTT spacer sequence TTCN PAM
uucugguacauauauauaau

SEQ ID NO: 29384 - RNA, 20 nt, Artificial Sequence
  HTT spacer sequence TTCN PAM
gguacauauauauaauuuuu

SEQ ID NO: 29385 - RNA, 20 nt, Artificial Sequence
  HTT spacer sequence TTCN PAM
agccugggcaaacagagcaa

SEQ ID NO: 29386 - RNA, 20 nt, Artificial Sequence
  HTT spacer sequence TTCN PAM
agugauucuccugccucagc

SEQ ID NO: 29387 - RNA, 20 nt, Artificial Sequence
  HTT spacer sequence TTCN PAM
ccugccucagcuugaguagc

SEQ ID NO: 29388 - RNA, 20 nt, Artificial Sequence
  HTT spacer sequence TTCN PAM
ccacguuggccaggcugguc

SEQ ID NO: 29389 - RNA, 20 nt, Artificial Sequence
  HTT spacer sequence TTCN PAM
agaccagccuggccaacgug

SEQ ID NO: 29390 - RNA, 20 nt, Artificial Sequence
  HTT spacer sequence TTCN PAM
gcuuccaagcaagagguagu

SEQ ID NO: 29391 - RNA, 20 nt, Artificial Sequence
  HTT spacer sequence TTCN PAM
aagcaagagguaguaacuag

SEQ ID NO: 29392 - RNA, 20 nt, Artificial Sequence
  HTT spacer sequence TTCN PAM
aguuacuaccucuugcuugg

SEQ ID NO: 29393 - RNA, 20 nt, Artificial Sequence
  HTT spacer sequence TTCN PAM
ugucucaaacagugaaacaa

SEQ ID NO: 29394 - RNA, 20 nt, Artificial Sequence
  HTT spacer sequence TTCN PAM
cuguuugagacaggaagaua

SEQ ID NO: 29395 - RNA, 20 nt, Artificial Sequence
  HTT spacer sequence TTCN PAM
aacauuggcccacaggcagg

SEQ ID NO: 29396 - RNA, 20 nt, Artificial Sequence
  HTT spacer sequence TTCN PAM
cucagggaucacuguccugc

SEQ ID NO: 29397 - RNA, 20 nt, Artificial Sequence
  HTT spacer sequence TTCN PAM
ucucucagggaucacugucc

SEQ ID NO: 29398 - RNA, 20 nt, Artificial Sequence
  HTT spacer sequence TTCN PAM
ucuucucucagggaucacug

SEQ ID NO: 29399 - RNA, 20 nt, Artificial Sequence
  HTT spacer sequence TTCN PAM
ugccuggagagagucugaag

SEQ ID NO: 29400 - RNA, 20 nt, Artificial Sequence
  HTT spacer sequence TTCN PAM
gacucucuccaggcaggaag

SEQ ID NO: 29401 - RNA, 20 nt, Artificial Sequence
  HTT spacer sequence TTCN PAM
ccucuuugcagcucucuccu

SEQ ID NO: 29402 - RNA, 20 nt, Artificial Sequence
  HTT spacer sequence TTCN PAM
uuccccucuuugcagcucuc

SEQ ID NO: 29403 - RNA, 20 nt, Artificial Sequence
  HTT spacer sequence TTCN PAM
ccccaagcccagcugagggc

SEQ ID NO: 29404 - RNA, 20 nt, Artificial Sequence
  HTT spacer sequence TTCN PAM
ccacaggcaugugcuuaugc

SEQ ID NO: 29405 - RNA, 20 nt, Artificial Sequence
  HTT spacer sequence TTCN PAM
agggugcuagcccaggcgca

SEQ ID NO: 29406 - RNA, 20 nt, Artificial Sequence
  HTT spacer sequence TTCN PAM
caccagccauugugggaaaa

SEQ ID NO: 29407 - RNA, 20 nt, Artificial Sequence
  HTT spacer sequence TTCN PAM
cacaauggcuggugggaaca

SEQ ID NO: 29408 - RNA, 20 nt, Artificial Sequence
  HTT spacer sequence TTCN PAM
ucuuacccacaacugaggca

SEQ ID NO: 29409 - RNA, 20 nt, Artificial Sequence
  HTT spacer sequence TTCN PAM
gaugcugccuuacagagccu

SEQ ID NO: 29410 - RNA, 20 nt, Artificial Sequence
  HTT spacer sequence TTCN PAM
gggcuuguaggcucuguaag

SEQ ID NO: 29411 - RNA, 20 nt, Artificial Sequence
  HTT spacer sequence TTCN PAM
caaacaacccuccuauggcc

SEQ ID NO: 29412 - RNA, 20 nt, Artificial Sequence
  HTT spacer sequence TTCN PAM
ucaugggccauaggaggguu

SEQ ID NO: 29413 - RNA, 20 nt, Artificial Sequence
  HTT spacer sequence TTCN PAM
guaucugagcuucgucaugg

SEQ ID NO: 29414 - RNA, 20 nt, Artificial Sequence
  HTT spacer sequence TTCN PAM
uucaguaucugagcuucguc

SEQ ID NO: 29415 - RNA, 20 nt, Artificial Sequence
  HTT spacer sequence TTCN PAM
uuccuucaguaucugagcuu

SEQ ID NO: 29416 - RNA, 20 nt, Artificial Sequence
  HTT spacer sequence TTCN PAM
uacuugucccuagcucuucu

SEQ ID NO: 29417 - RNA, 20 nt, Artificial Sequence
  HTT spacer sequence TTCN PAM
ccuccucucacaccucacag

SEQ ID NO: 29418 - RNA, 20 nt, Artificial Sequence
  HTT spacer sequence TTCN PAM
cagccuuauccacuucccuu

SEQ ID NO: 29419 - RNA, 20 nt, Artificial Sequence
  HTT spacer sequence TTCN PAM
cuuccugcagcccuggucca

SEQ ID NO: 29420 - RNA, 20 nt, Artificial Sequence
  HTT spacer sequence TTCN PAM
ugcagcccugguccaagcug

SEQ ID NO: 29421 - RNA, 20 nt, Artificial Sequence
  HTT spacer sequence TTCN PAM
ggagccagacagcagcagcu

SEQ ID NO: 29422 - RNA, 20 nt, Artificial Sequence
  HTT spacer sequence TTCN PAM
ucccauugucccaucccauc

SEQ ID NO: 29423 - RNA, 20 nt, Artificial Sequence
  HTT spacer sequence TTCN PAM
cauugucccaucccaucucu

SEQ ID NO: 29424 - RNA, 20 nt, Artificial Sequence
  HTT spacer sequence TTCN PAM
guggcccucagcucuccccc

SEQ ID NO: 29425 - RNA, 20 nt, Artificial Sequence
  HTT spacer sequence TTCN PAM
gcucuugucagccccaugcc

SEQ ID NO: 29426 - RNA, 20 nt, Artificial Sequence
  HTT spacer sequence TTCN PAM
ggggucuccucaaggaggcc

SEQ ID NO: 29427 - RNA, 20 nt, Artificial Sequence
  HTT spacer sequence TTCN PAM
uugcuguuauguuuuucucc

SEQ ID NO: 29428 - RNA, 20 nt, Artificial Sequence
  HTT spacer sequence TTCN PAM
ccuuaucacuauuuaauuag

SEQ ID NO: 29429 - RNA, 20 nt, Artificial Sequence
  HTT spacer sequence TTCN PAM
uguauuugucuuauuuauug

SEQ ID NO: 29430 - RNA, 20 nt, Artificial Sequence
  HTT spacer sequence TTCN PAM
ucaccauugugcccucagug

SEQ ID NO: 29431 - RNA, 20 nt, Artificial Sequence
  HTT spacer sequence TTCN PAM
ccauugugcccucagugccu

SEQ ID NO: 29432 - RNA, 20 nt, Artificial Sequence
  HTT spacer sequence TTCN PAM
ccagucauccaggauuuacu

SEQ ID NO: 29433 - RNA, 20 nt, Artificial Sequence
  HTT spacer sequence TTCN PAM
ggcucuuaacauuaugauuu

SEQ ID NO: 29434 - RNA, 20 nt, Artificial Sequence
  HTT spacer sequence TTCN PAM
guaauuaaaagggcaagcca

SEQ ID NO: 29435 - RNA, 20 nt, Artificial Sequence
  HTT spacer sequence TTCN PAM
ggcuugcccuuuuaauuaca

SEQ ID NO: 29436 - RNA, 20 nt, Artificial Sequence
  HTT spacer sequence TTCN PAM
gccagugaugggagcuguuu

SEQ ID NO: 29437 - RNA, 20 nt, Artificial Sequence
  HTT spacer sequence TTCN PAM
aagaccugaggaaaagagau

SEQ ID NO: 29438 - RNA, 20 nt, Artificial Sequence
  HTT spacer sequence TTCN PAM
ucaggucuuagaaaacagcu

SEQ ID NO: 29439 - RNA, 20 nt, Artificial Sequence
  HTT spacer sequence TTCN PAM
auaccaacaaaucccaaaag

SEQ ID NO: 29440 - RNA, 20 nt, Artificial Sequence
  HTT spacer sequence TTCN PAM
caugguacucggugguuuga

SEQ ID NO: 29441 - RNA, 20 nt, Artificial Sequence
  HTT spacer sequence TTCN PAM
cuaggacacuguggggaggu

SEQ ID NO: 29442 - RNA, 20 nt, Artificial Sequence
  HTT spacer sequence TTCN PAM
gcucaggauggcugcugagc

SEQ ID NO: 29443 - RNA, 20 nt, Artificial Sequence
  HTT spacer sequence TTCN PAM
caaacccagcucagcagcca

SEQ ID NO: 29444 - RNA, 20 nt, Artificial Sequence
  HTT spacer sequence TTCN PAM
uggaaacaugugagaauaua

SEQ ID NO: 29445 - RNA, 20 nt, Artificial Sequence
  HTT spacer sequence TTCN PAM
augaaccagugaucaaaacu

SEQ ID NO: 29446 - RNA, 20 nt, Artificial Sequence
  HTT spacer sequence TTCN PAM
cacauguuuccaugaaccag

SEQ ID NO: 29447 - RNA, 20 nt, Artificial Sequence
  HTT spacer sequence TTCN PAM
uauauauucucacauguuuc

SEQ ID NO: 29448 - RNA, 20 nt, Artificial Sequence
  HTT spacer sequence TTCN PAM
uucuuucaaucacuaauuca

SEQ ID NO: 29449 - RNA, 20 nt, Artificial Sequence
  HTT spacer sequence TTCN PAM
uucaaucacuaauucauuca

SEQ ID NO: 29450 - RNA, 20 nt, Artificial Sequence
  HTT spacer sequence TTCN PAM
aucacuaauucauucauuua

SEQ ID NO: 29451 - RNA, 20 nt, Artificial Sequence
  HTT spacer sequence TTCN PAM
uucauuuauacauucagccc

SEQ ID NO: 29452 - RNA, 20 nt, Artificial Sequence
  HTT spacer sequence TTCN PAM
uuuauacauucagccccuug

SEQ ID NO: 29453 - RNA, 20 nt, Artificial Sequence
  HTT spacer sequence TTCN PAM
gccccuuguuuaaauaugug

SEQ ID NO: 29454 - RNA, 20 nt, Artificial Sequence
  HTT spacer sequence TTCN PAM
ugccggucagcaggaagucu

SEQ ID NO: 29455 - RNA, 20 nt, Artificial Sequence
  HTT spacer sequence TTCN PAM
ugcugaccggcaggaagcac

SEQ ID NO: 29456 - RNA, 20 nt, Artificial Sequence
  HTT spacer sequence TTCN PAM
uaagacuuccugcugaccgg

SEQ ID NO: 29457 - RNA, 20 nt, Artificial Sequence
  HTT spacer sequence TTCN PAM
ggggccaauccguuauguac

SEQ ID NO: 29458 - RNA, 20 nt, Artificial Sequence
  HTT spacer sequence TTCN PAM
aaaggacccacuguacauaa

SEQ ID NO: 29459 - RNA, 20 nt, Artificial Sequence
  HTT spacer sequence TTCN PAM
cacagccucgagcugucucc

SEQ ID NO: 29460 - RNA, 20 nt, Artificial Sequence
  HTT spacer sequence TTCN PAM
ccaaggccggcuagaccugu

SEQ ID NO: 29461 - RNA, 20 nt, Artificial Sequence
  HTT spacer sequence TTCN PAM
ggguggagauggagacugaa

SEQ ID NO: 29462 - RNA, 20 nt, Artificial Sequence
  HTT spacer sequence TTCN PAM
gucuccaucuccacccagaa

SEQ ID NO: 29463 - RNA, 20 nt, Artificial Sequence
  HTT spacer sequence TTCN PAM
ggcuuuucagucuccaucuc

SEQ ID NO: 29464 - RNA, 20 nt, Artificial Sequence
  HTT spacer sequence TTCN PAM
caccuggcaugucuugcagc

SEQ ID NO: 29465 - RNA, 20 nt, Artificial Sequence
  HTT spacer sequence TTCN PAM
cucaccuccaccccacugug

SEQ ID NO: 29466 - RNA, 20 nt, Artificial Sequence
  HTT spacer sequence TTCN PAM
ggcugccucuggaaggccag

SEQ ID NO: 29467 - RNA, 20 nt, Artificial Sequence
  HTT spacer sequence TTCN PAM
agaggcagccagaaaaaggg

SEQ ID NO: 29468 - RNA, 20 nt, Artificial Sequence
  HTT spacer sequence TTCN PAM
cuuugcccugcucccuggga

SEQ ID NO: 29469 - RNA, 20 nt, Artificial Sequence
  HTT spacer sequence TTCN PAM
aaggggcuuccuccuaaggu

SEQ ID NO: 29470 - RNA, 20 nt, Artificial Sequence
  HTT spacer sequence TTCN PAM
aacccugaggagaggcugga

SEQ ID NO: 29471 - RNA, 20 nt, Artificial Sequence
  HTT spacer sequence TTCN PAM
uccuaaggugcagaggcagc

SEQ ID NO: 29472 - RNA, 20 nt, Artificial Sequence
  HTT spacer sequence TTCN PAM
cacagggcugccucugcacc

SEQ ID NO: 29473 - RNA, 20 nt, Artificial Sequence
  HTT spacer sequence TTCN PAM
aguugugugagacucaguuu

SEQ ID NO: 29474 - RNA, 20 nt, Artificial Sequence
  HTT spacer sequence TTCN PAM
uucuuuuucuuuucuuuucc

SEQ ID NO: 29475 - RNA, 20 nt, Artificial Sequence
  HTT spacer sequence TTCN PAM
uuuucuuuucuuuuccuuuu

SEQ ID NO: 29476 - RNA, 20 nt, Artificial Sequence
  HTT spacer sequence TTCN PAM
uuucuuuuccuuuuuuuuuu

SEQ ID NO: 29477 - RNA, 20 nt, Artificial Sequence
  HTT spacer sequence TTCN PAM
uuuccuuuuuuuuuuuuuuu

SEQ ID NO: 29478 - RNA, 20 nt, Artificial Sequence
  HTT spacer sequence TTCN PAM
uuuuuuuuuuuuuuuuuuuu

SEQ ID NO: 29479 - RNA, 20 nt, Artificial Sequence
  HTT spacer sequence TTCN PAM
agccugggcaauagagcaag

SEQ ID NO: 29480 - RNA, 20 nt, Artificial Sequence
  HTT spacer sequence TTCN PAM
agguucaaacgauucuccug

SEQ ID NO: 29481 - RNA, 20 nt, Artificial Sequence
  HTT spacer sequence TTCN PAM
aacgauucuccugcgucagc

SEQ ID NO: 29482 - RNA, 20 nt, Artificial Sequence
  HTT spacer sequence TTCN PAM
ccugcgucagccuccugagu

SEQ ID NO: 29483 - RNA, 20 nt, Artificial Sequence
  HTT spacer sequence TTCN PAM
auuaaaaacacaaaauuagc

SEQ ID NO: 29484 - RNA, 20 nt, Artificial Sequence
  HTT spacer sequence TTCN PAM
ccauguuggccaggcuggau

SEQ ID NO: 29485 - RNA, 20 nt, Artificial Sequence
  HTT spacer sequence TTCN PAM
uucuuuuuuuuuuuugacac

SEQ ID NO: 29486 - RNA, 20 nt, Artificial Sequence
  HTT spacer sequence TTCN PAM
uuuuuuuuuuugacacgggg

SEQ ID NO: 29487 - RNA, 20 nt, Artificial Sequence
  HTT spacer sequence TTCN PAM
ccucugcaaaaaauccaacu

SEQ ID NO: 29488 - RNA, 20 nt, Artificial Sequence
  HTT spacer sequence TTCN PAM
guuucuuuuucuguauuugu

SEQ ID NO: 29489 - RNA, 20 nt, Artificial Sequence
  HTT spacer sequence TTCN PAM
uuuucuguauuuguguuuua

SEQ ID NO: 29490 - RNA, 20 nt, Artificial Sequence
  HTT spacer sequence TTCN PAM
guauuuguguuuuaaaggcu

SEQ ID NO: 29491 - RNA, 20 nt, Artificial Sequence
  HTT spacer sequence TTCN PAM
gauagagugggugguuaucu

SEQ ID NO: 29492 - RNA, 20 nt, Artificial Sequence
  HTT spacer sequence TTCN PAM
uccuaccucuaaggccucuu

SEQ ID NO: 29493 - RNA, 20 nt, Artificial Sequence
  HTT spacer sequence TTCN PAM
ccuugccccacauuguagga

SEQ ID NO: 29494 - RNA, 20 nt, Artificial Sequence
  HTT spacer sequence TTCN PAM
aauagguccuacaauguggg

SEQ ID NO: 29495 - RNA, 20 nt, Artificial Sequence
  HTT spacer sequence TTCN PAM
aggcccagcaguaaugaugc

SEQ ID NO: 29496 - RNA, 20 nt, Artificial Sequence
  HTT spacer sequence TTCN PAM
agauaaacagggagcugaug

SEQ ID NO: 29497 - RNA, 20 nt, Artificial Sequence
  HTT spacer sequence TTCN PAM
agauucaagauaaacaggga

SEQ ID NO: 29498 - RNA, 20 nt, Artificial Sequence
  HTT spacer sequence TTCN PAM
ggcuuaagugugucugcaga

SEQ ID NO: 29499 - RNA, 20 nt, Artificial Sequence
  HTT spacer sequence TTCN PAM
agauggcaauucuggcuuaa

SEQ ID NO: 29500 - RNA, 20 nt, Artificial Sequence
  HTT spacer sequence TTCN PAM
agaggcaucugcacaccagg

SEQ ID NO: 29501 - RNA, 20 nt, Artificial Sequence
  HTT spacer sequence TTCN PAM
gacuucguuggugguaacca

SEQ ID NO: 29502 - RNA, 20 nt, Artificial Sequence
  HTT spacer sequence TTCN PAM
uuggugguaaccaguucugg

SEQ ID NO: 29503 - RNA, 20 nt, Artificial Sequence
  HTT spacer sequence TTCN PAM
gguaaacagucugaaaauug

SEQ ID NO: 29504 - RNA, 20 nt, Artificial Sequence
  HTT spacer sequence TTCN PAM
gacuguuuaccagaacuggu

SEQ ID NO: 29505 - RNA, 20 nt, Artificial Sequence
  HTT spacer sequence TTCN PAM
agcaugugguggaaaaguaa

SEQ ID NO: 29506 - RNA, 20 nt, Artificial Sequence
  HTT spacer sequence TTCN PAM
accacaugcuagaaacuguc

SEQ ID NO: 29507 - RNA, 20 nt, Artificial Sequence
  HTT spacer sequence TTCN PAM
accugggucgcugggcacug

SEQ ID NO: 29508 - RNA, 20 nt, Artificial Sequence
  HTT spacer sequence TTCN PAM
cgcccgugagugagguagcg

SEQ ID NO: 29509 - RNA, 20 nt, Artificial Sequence
  HTT spacer sequence TTCN PAM
ccccccaggggccucguccc

SEQ ID NO: 29510 - RNA, 20 nt, Artificial Sequence
  HTT spacer sequence TTCN PAM
ccgcccacccugagguaccg

SEQ ID NO: 29511 - RNA, 20 nt, Artificial Sequence
  HTT spacer sequence TTCN PAM
agacgcggagaccgcccccc

SEQ ID NO: 29512 - RNA, 20 nt, Artificial Sequence
  HTT spacer sequence TTCN PAM
gggcgggggccggguguccc

SEQ ID NO: 29513 - RNA, 20 nt, Artificial Sequence
  HTT spacer sequence TTCN PAM
caccccucgcgccccucugg

SEQ ID NO: 29514 - RNA, 20 nt, Artificial Sequence
  HTT spacer sequence TTCN PAM
cggaauccaaacuucccucu

SEQ ID NO: 29515 - RNA, 20 nt, Artificial Sequence
  HTT spacer sequence TTCN PAM
gggaagggcggagagcgagu

SEQ ID NO: 29516 - RNA, 20 nt, Artificial Sequence
  HTT spacer sequence TTCN PAM
cucugcagcggccgcgcuuc

SEQ ID NO: 29517 - RNA, 20 nt, Artificial Sequence
  HTT spacer sequence TTCN PAM
cggagggcaagaaaagccgc

SEQ ID NO: 29518 - RNA, 20 nt, Artificial Sequence
  HTT spacer sequence TTCN PAM
ugcccuccgugaagcgcggc

SEQ ID NO: 29519 - RNA, 20 nt, Artificial Sequence
  HTT spacer sequence TTCN PAM
cacugaagugugagugacug

SEQ ID NO: 29520 - RNA, 20 nt, Artificial Sequence
  HTT spacer sequence TTCN PAM
gugugaaucagcgccagugg

SEQ ID NO: 29521 - RNA, 20 nt, Artificial Sequence
  HTT spacer sequence TTCN PAM
cuguugcccaugagagucuc

SEQ ID NO: 29522 - RNA, 20 nt, Artificial Sequence
  HTT spacer sequence TTCN PAM
accuguacgcuggccucccu

SEQ ID NO: 29523 - RNA, 20 nt, Artificial Sequence
  HTT spacer sequence TTCN PAM
cgcugcucugggccucggcu

SEQ ID NO: 29524 - RNA, 20 nt, Artificial Sequence
  HTT spacer sequence TTCN PAM
gcuggugcuccuuuccguga

SEQ ID NO: 29525 - RNA, 20 nt, Artificial Sequence
  HTT spacer sequence TTCN PAM
gugagcaccuccuauccccu

SEQ ID NO: 29526 - RNA, 20 nt, Artificial Sequence
  HTT spacer sequence TTCN PAM
aauuggcuguggccaggggc

SEQ ID NO: 29527 - RNA, 20 nt, Artificial Sequence
  HTT spacer sequence TTCN PAM
aaggacuuaaguguggccac

SEQ ID NO: 29528 - RNA, 20 nt, Artificial Sequence
  HTT spacer sequence TTCN PAM
acacauugcaucaccggccc

SEQ ID NO: 29529 - RNA, 20 nt, Artificial Sequence
  HTT spacer sequence TTCN PAM
acaaccgccugaaggcaggg

SEQ ID NO: 29530 - RNA, 20 nt, Artificial Sequence
  HTT spacer sequence TTCN PAM
ggcgguuguggaaacaauuc

SEQ ID NO: 29531 - RNA, 20 nt, Artificial Sequence
  HTT spacer sequence TTCN PAM
gcaaggaggaggcugugggc

SEQ ID NO: 29532 - RNA, 20 nt, Artificial Sequence
  HTT spacer sequence TTCN PAM
ggucagcccugcaccaacuc

SEQ ID NO: 29533 - RNA, 20 nt, Artificial Sequence
  HTT spacer sequence TTCN PAM
ucccacucuguccacugucu

SEQ ID NO: 29534 - RNA, 20 nt, Artificial Sequence
  HTT spacer sequence TTCN PAM
cacucuguccacugucuccu

SEQ ID NO: 29535 - RNA, 20 nt, Artificial Sequence
  HTT spacer sequence TTCN PAM
acggugucuacguagaggag

SEQ ID NO: 29536 - RNA, 20 nt, Artificial Sequence
  HTT spacer sequence TTCN PAM
gucuauccccucucccugcc

SEQ ID NO: 29537 - RNA, 20 nt, Artificial Sequence
  HTT spacer sequence TTCN PAM
gccugcccccuccagggugu

SEQ ID NO: 29538 - RNA, 20 nt, Artificial Sequence
  HTT spacer sequence TTCN PAM
uucugccugcccccuccagg

SEQ ID NO: 29539 - RNA, 20 nt, Artificial Sequence
  HTT spacer sequence TTCN PAM
uagacacggcugccuaucug

SEQ ID NO: 29540 - RNA, 20 nt, Artificial Sequence
  HTT spacer sequence TTCN PAM
gggaguccccaggccuccag

SEQ ID NO: 29541 - RNA, 20 nt, Artificial Sequence
  HTT spacer sequence TTCN PAM
ggccagccuccuuggugggc

SEQ ID NO: 29542 - RNA, 20 nt, Artificial Sequence
  HTT spacer sequence TTCN PAM
gcccacauggacagaggaag

SEQ ID NO: 29543 - RNA, 20 nt, Artificial Sequence
  HTT spacer sequence TTCN PAM
ucuguccaugugggcagaaa

SEQ ID NO: 29544 - RNA, 20 nt, Artificial Sequence
  HTT spacer sequence TTCN PAM
cgucugugggccugcuugug

SEQ ID NO: 29545 - RNA, 20 nt, Artificial Sequence
  HTT spacer sequence TTCN PAM
ugaggggcagggaggaaggg

SEQ ID NO: 29546 - RNA, 20 nt, Artificial Sequence
  HTT spacer sequence TTCN PAM
ucccugccccucaggaacca

SEQ ID NO: 29547 - RNA, 20 nt, Artificial Sequence
  HTT spacer sequence TTCN PAM
cacccaagauccuggcugag

SEQ ID NO: 29548 - RNA, 20 nt, Artificial Sequence
  HTT spacer sequence TTCN PAM
agcugugugaucauggccag

SEQ ID NO: 29549 - RNA, 20 nt, Artificial Sequence
  HTT spacer sequence TTCN PAM
cccugccaccccuccguuuu

SEQ ID NO: 29550 - RNA, 20 nt, Artificial Sequence
  HTT spacer sequence TTCN PAM
cauccaugaccugagggcug

SEQ ID NO: 29551 - RNA, 20 nt, Artificial Sequence
  HTT spacer sequence TTCN PAM
cagcccucaggucauggaug

SEQ ID NO: 29552 - RNA, 20 nt, Artificial Sequence
  HTT spacer sequence TTCN PAM
gugacagugggucgcugagg

SEQ ID NO: 29553 - RNA, 20 nt, Artificial Sequence
  HTT spacer sequence TTCN PAM
ugcccacauuggacuaaggc

SEQ ID NO: 29554 - RNA, 20 nt, Artificial Sequence
  HTT spacer sequence TTCN PAM
ugcguucuguccucaaaagc

SEQ ID NO: 29555 - RNA, 20 nt, Artificial Sequence
  HTT spacer sequence TTCN PAM
guccucaaaagcucccuugu

SEQ ID NO: 29556 - RNA, 20 nt, Artificial Sequence
  HTT spacer sequence TTCN PAM
uuaauaaccggguggcuugg

SEQ ID NO: 29557 - RNA, 20 nt, Artificial Sequence
  HTT spacer sequence TTCN PAM
ccucacccacccaggcugca

SEQ ID NO: 29558 - RNA, 20 nt, Artificial Sequence
  HTT spacer sequence TTCN PAM
ccgccagccugcccuucucc

SEQ ID NO: 29559 - RNA, 20 nt, Artificial Sequence
  HTT spacer sequence TTCN PAM
ccgucuuuuccccgccagcc

SEQ ID NO: 29560 - RNA, 20 nt, Artificial Sequence
  HTT spacer sequence TTCN PAM
uuggcccgaggggugggagc

SEQ ID NO: 29561 - RNA, 20 nt, Artificial Sequence
  HTT spacer sequence TTCN PAM
ccuugccucccaggccccuc

SEQ ID NO: 29562 - RNA, 20 nt, Artificial Sequence
  HTT spacer sequence TTCN PAM
agggucugcacggccccuuc

SEQ ID NO: 29563 - RNA, 20 nt, Artificial Sequence
  HTT spacer sequence TTCN PAM
uccaggauaggcggcuccuc

SEQ ID NO: 29564 - RNA, 20 nt, Artificial Sequence
  HTT spacer sequence TTCN PAM
ggggaggagccgccuauccu

SEQ ID NO: 29565 - RNA, 20 nt, Artificial Sequence
  HTT spacer sequence TTCN PAM
ucugguggcccugucuggac

SEQ ID NO: 29566 - RNA, 20 nt, Artificial Sequence
  HTT spacer sequence TTCN PAM
gguggcccugucuggacacc

SEQ ID NO: 29567 - RNA, 20 nt, Artificial Sequence
  HTT spacer sequence TTCN PAM
ggcucacuggcuggcccccu

SEQ ID NO: 29568 - RNA, 20 nt, Artificial Sequence
  HTT spacer sequence TTCN PAM
cuggggcacuggacccuccu

SEQ ID NO: 29569 - RNA, 20 nt, Artificial Sequence
  HTT spacer sequence TTCN PAM
ccuacaaggcucaggucucc

SEQ ID NO: 29570 - RNA, 20 nt, Artificial Sequence
  HTT spacer sequence TTCN PAM
ugacccucaguuuccugauc

SEQ ID NO: 29571 - RNA, 20 nt, Artificial Sequence
  HTT spacer sequence TTCN PAM
ugaucugcaaaacgggauga

SEQ ID NO: 29572 - RNA, 20 nt, Artificial Sequence
  HTT spacer sequence TTCN PAM
gucaucccguuuugcagauc

SEQ ID NO: 29573 - RNA, 20 nt, Artificial Sequence
  HTT spacer sequence TTCN PAM
gugccgggccccugacuaca

SEQ ID NO: 29574 - RNA, 20 nt, Artificial Sequence
  HTT spacer sequence TTCN PAM
agggugacgcgagagaagca

SEQ ID NO: 29575 - RNA, 20 nt, Artificial Sequence
  HTT spacer sequence TTCN PAM
cucgcgucacccuugaagga

SEQ ID NO: 29576 - RNA, 20 nt, Artificial Sequence
  HTT spacer sequence TTCN PAM
gggcggguggagaccugggu

SEQ ID NO: 29577 - RNA, 20 nt, Artificial Sequence
  HTT spacer sequence TTCN PAM
agguggugcaggcucccagg

SEQ ID NO: 29578 - RNA, 20 nt, Artificial Sequence
  HTT spacer sequence TTCN PAM
ccccuccugggagccugcac

SEQ ID NO: 29579 - RNA, 20 nt, Artificial Sequence
  HTT spacer sequence TTCN PAM
cucuucuccccaggcucugu

SEQ ID NO: 29580 - RNA, 20 nt, Artificial Sequence
  HTT spacer sequence TTCN PAM
ccccaggcucuguaacuucc

SEQ ID NO: 29581 - RNA, 20 nt, Artificial Sequence
  HTT spacer sequence TTCN PAM
aaggccaugagaguggucag

SEQ ID NO: 29582 - RNA, 20 nt, Artificial Sequence
  HTT spacer sequence TTCN PAM
cggcccccgaucacagaucg

SEQ ID NO: 29583 - RNA, 20 nt, Artificial Sequence
  HTT spacer sequence TTCN PAM
agcacgaucugugaucgggg

SEQ ID NO: 29584 - RNA, 20 nt, Artificial Sequence
  HTT spacer sequence TTCN PAM
ucauggauuccggucacauc

SEQ ID NO: 29585 - RNA, 20 nt, Artificial Sequence
  HTT spacer sequence TTCN PAM
uggauuccggucacaucugg

SEQ ID NO: 29586 - RNA, 20 nt, Artificial Sequence
  HTT spacer sequence TTCN PAM
ggucacaucugguccaucuu

SEQ ID NO: 29587 - RNA, 20 nt, Artificial Sequence
  HTT spacer sequence TTCN PAM
cagaggccagcugacaaaga

SEQ ID NO: 29588 - RNA, 20 nt, Artificial Sequence
  HTT spacer sequence TTCN PAM
ucccagaggccagcugacaa

SEQ ID NO: 29589 - RNA, 20 nt, Artificial Sequence
  HTT spacer sequence TTCN PAM
aagaagugcccucugcuucc

SEQ ID NO: 29590 - RNA, 20 nt, Artificial Sequence
  HTT spacer sequence TTCN PAM
uggaaucagcucagcuacag

SEQ ID NO: 29591 - RNA, 20 nt, Artificial Sequence
  HTT spacer sequence TTCN PAM
uugugaaucagauguuuacu

SEQ ID NO: 29592 - RNA, 20 nt, Artificial Sequence
  HTT spacer sequence TTCN PAM
caaggaagcagagggcacuu

SEQ ID NO: 29593 - RNA, 20 nt, Artificial Sequence
  HTT spacer sequence TTCN PAM
ugaggcuguugccugccagc

SEQ ID NO: 29594 - RNA, 20 nt, Artificial Sequence
  HTT spacer sequence TTCN PAM
cucggccccugccucgcggc

SEQ ID NO: 29595 - RNA, 20 nt, Artificial Sequence
  HTT spacer sequence TTCN PAM
cucaggcaccagaggggagc

SEQ ID NO: 29596 - RNA, 20 nt, Artificial Sequence
  HTT spacer sequence TTCN PAM
gggcucagagcaggcuucgu

SEQ ID NO: 29597 - RNA, 20 nt, Artificial Sequence
  HTT spacer sequence TTCN PAM
ucugagggcuucagcguccu

SEQ ID NO: 29598 - RNA, 20 nt, Artificial Sequence
  HTT spacer sequence TTCN PAM
gcguccuccuugugaaaugg

SEQ ID NO: 29599 - RNA, 20 nt, Artificial Sequence
  HTT spacer sequence TTCN PAM
caaggaggacgcugaagccc

SEQ ID NO: 29600 - RNA, 20 nt, Artificial Sequence
  HTT spacer sequence TTCN PAM
ccccauuucacaaggaggac

SEQ ID NO: 29601 - RNA, 20 nt, Artificial Sequence
  HTT spacer sequence TTCN PAM
cacagugucaagggcaggga

SEQ ID NO: 29602 - RNA, 20 nt, Artificial Sequence
  HTT spacer sequence TTCN PAM
uucagccucgauccaggggu

SEQ ID NO: 29603 - RNA, 20 nt, Artificial Sequence
  HTT spacer sequence TTCN PAM
gccucgauccagggguguug

SEQ ID NO: 29604 - RNA, 20 nt, Artificial Sequence
  HTT spacer sequence TTCN PAM
guggcauuugaggguccugg

SEQ ID NO: 29605 - RNA, 20 nt, Artificial Sequence
  HTT spacer sequence TTCN PAM
caccuuguccaggggcagcc

SEQ ID NO: 29606 - RNA, 20 nt, Artificial Sequence
  HTT spacer sequence TTCN PAM
gggagccuggaaugcugggc

SEQ ID NO: 29607 - RNA, 20 nt, Artificial Sequence
  HTT spacer sequence TTCN PAM
aggcucccagaaugaccccu

SEQ ID NO: 29608 - RNA, 20 nt, Artificial Sequence
  HTT spacer sequence TTCN PAM
cagccuugggagucuggggc

SEQ ID NO: 29609 - RNA, 20 nt, Artificial Sequence
  HTT spacer sequence TTCN PAM
gccucuggggcaguggugga

SEQ ID NO: 29610 - RNA, 20 nt, Artificial Sequence
  HTT spacer sequence TTCN PAM
gaaggcugcugcccagcccc

SEQ ID NO: 29611 - RNA, 20 nt, Artificial Sequence
  HTT spacer sequence TTCN PAM
gaaggagguccaccacugcc

SEQ ID NO: 29612 - RNA, 20 nt, Artificial Sequence
  HTT spacer sequence TTCN PAM
aagggagagaguggcaaggu

SEQ ID NO: 29613 - RNA, 20 nt, Artificial Sequence
  HTT spacer sequence TTCN PAM
gcugaagacauaagugucug

SEQ ID NO: 29614 - RNA, 20 nt, Artificial Sequence
  HTT spacer sequence TTCN PAM
gcugaaauugcuucuaaggg

SEQ ID NO: 29615 - RNA, 20 nt, Artificial Sequence
  HTT spacer sequence TTCN PAM
ugagcccccagccuggucua

SEQ ID NO: 29616 - RNA, 20 nt, Artificial Sequence
  HTT spacer sequence TTCN PAM
caagcaggaggggcaggcgg

SEQ ID NO: 29617 - RNA, 20 nt, Artificial Sequence
  HTT spacer sequence TTCN PAM
ugaguucccaagcaggaggg

SEQ ID NO: 29618 - RNA, 20 nt, Artificial Sequence
  HTT spacer sequence TTCN PAM
ucugggacaggcccacgugg

SEQ ID NO: 29619 - RNA, 20 nt, Artificial Sequence
  HTT spacer sequence TTCN PAM
cugcccaggagugggaggcu

SEQ ID NO: 29620 - RNA, 20 nt, Artificial Sequence
  HTT spacer sequence TTCN PAM
aagagcuuggcacagcccgc

SEQ ID NO: 29621 - RNA, 20 nt, Artificial Sequence
  HTT spacer sequence TTCN PAM
aaucagauaauaucagacug

SEQ ID NO: 29622 - RNA, 20 nt, Artificial Sequence
  HTT spacer sequence TTCN PAM
ugggagaccaaagcacaaca

SEQ ID NO: 29623 - RNA, 20 nt, Artificial Sequence
  HTT spacer sequence TTCN PAM
gguuuccaucacagccuccu

SEQ ID NO: 29624 - RNA, 20 nt, Artificial Sequence
  HTT spacer sequence TTCN PAM
aucacagccuccucccuucc

SEQ ID NO: 29625 - RNA, 20 nt, Artificial Sequence
  HTT spacer sequence TTCN PAM
cccugcgggcugcgcuguga

SEQ ID NO: 29626 - RNA, 20 nt, Artificial Sequence
  HTT spacer sequence TTCN PAM
gggccuggucucgguggccc

SEQ ID NO: 29627 - RNA, 20 nt, Artificial Sequence
  HTT spacer sequence TTCN PAM
ucaccaggcuuugguccucc

SEQ ID NO: 29628 - RNA, 20 nt, Artificial Sequence
  HTT spacer sequence TTCN PAM
gggagaggacaggggacacc

SEQ ID NO: 29629 - RNA, 20 nt, Artificial Sequence
  HTT spacer sequence TTCN PAM
uucagggagaggacagggga

SEQ ID NO: 29630 - RNA, 20 nt, Artificial Sequence
  HTT spacer sequence TTCN PAM
uucucuguagcugcucuucc

SEQ ID NO: 29631 - RNA, 20 nt, Artificial Sequence
  HTT spacer sequence TTCN PAM
cuguagcugcucuuccuaaa

SEQ ID NO: 29632 - RNA, 20 nt, Artificial Sequence
  HTT spacer sequence TTCN PAM
uaaacguguguuggcuugag

SEQ ID NO: 29633 - RNA, 20 nt, Artificial Sequence
  HTT spacer sequence TTCN PAM
caccauuaggagggcaaugg

SEQ ID NO: 29634 - RNA, 20 nt, Artificial Sequence
  HTT spacer sequence TTCN PAM
ccauugcccuccuaauggug

SEQ ID NO: 29635 - RNA, 20 nt, Artificial Sequence
  HTT spacer sequence TTCN PAM
ggaucuuuccccauugcccu

SEQ ID NO: 29636 - RNA, 20 nt, Artificial Sequence
  HTT spacer sequence TTCN PAM
uggccugccuccucuggcuc

SEQ ID NO: 29637 - RNA, 20 nt, Artificial Sequence
  HTT spacer sequence TTCN PAM
gagagaggagaugagugccg

SEQ ID NO: 29638 - RNA, 20 nt, Artificial Sequence
  HTT spacer sequence TTCN PAM
ucuccuccuacucgaggcca

SEQ ID NO: 29639 - RNA, 20 nt, Artificial Sequence
  HTT spacer sequence TTCN PAM
ggccucgaguaggaggagag

SEQ ID NO: 29640 - RNA, 20 nt, Artificial Sequence
  HTT spacer sequence TTCN PAM
cuuucuggccucgaguagga

SEQ ID NO: 29641 - RNA, 20 nt, Artificial Sequence
  HTT spacer sequence TTCN PAM
aguggggugaguggcuggcg

SEQ ID NO: 29642 - RNA, 20 nt, Artificial Sequence
  HTT spacer sequence TTCN PAM
ccucugcccuggucaaacuc

SEQ ID NO: 29643 - RNA, 20 nt, Artificial Sequence
  HTT spacer sequence TTCN PAM
cccagcucgggggaugcacc

SEQ ID NO: 29644 - RNA, 20 nt, Artificial Sequence
  HTT spacer sequence TTCN PAM
cguugccaucaccucuugug

SEQ ID NO: 29645 - RNA, 20 nt, Artificial Sequence
  HTT spacer sequence TTCN PAM
caggcugagaccucuaggaa

SEQ ID NO: 29646 - RNA, 20 nt, Artificial Sequence
  HTT spacer sequence TTCN PAM
uagaggucucagccugggaa

SEQ ID NO: 29647 - RNA, 20 nt, Artificial Sequence
  HTT spacer sequence TTCN PAM
cugggcagggcagggacagg

SEQ ID NO: 29648 - RNA, 20 nt, Artificial Sequence
  HTT spacer sequence TTCN PAM
ugucccugcccugcccagag

SEQ ID NO: 29649 - RNA, 20 nt, Artificial Sequence
  HTT spacer sequence TTCN PAM
caggccccgugcugcgugca

SEQ ID NO: 29650 - RNA, 20 nt, Artificial Sequence
  HTT spacer sequence TTCN PAM
uuccugcuguaccccugcug

SEQ ID NO: 29651 - RNA, 20 nt, Artificial Sequence
  HTT spacer sequence TTCN PAM
ugcuguaccccugcuggcug

SEQ ID NO: 29652 - RNA, 20 nt, Artificial Sequence
  HTT spacer sequence TTCN PAM
uccccaccggaggagcugcu

SEQ ID NO: 29653 - RNA, 20 nt, Artificial Sequence
  HTT spacer sequence TTCN PAM
acccccagggucccgccugg

SEQ ID NO: 29654 - RNA, 20 nt, Artificial Sequence
  HTT spacer sequence TTCN PAM
gagauuccacccccaggguc

SEQ ID NO: 29655 - RNA, 20 nt, Artificial Sequence
  HTT spacer sequence TTCN PAM
ccucgggacccucaccgcga

SEQ ID NO: 29656 - RNA, 20 nt, Artificial Sequence
  HTT spacer sequence TTCN PAM
cucagcuucagacccugggc

SEQ ID NO: 29657 - RNA, 20 nt, Artificial Sequence
  HTT spacer sequence TTCN PAM
gacccugggcugcagcugcc

SEQ ID NO: 29658 - RNA, 20 nt, Artificial Sequence
  HTT spacer sequence TTCN PAM
ggaagguuugcuacuugggg

SEQ ID NO: 29659 - RNA, 20 nt, Artificial Sequence
  HTT spacer sequence TTCN PAM
ugaagccagcacccaggacc

SEQ ID NO: 29660 - RNA, 20 nt, Artificial Sequence
  HTT spacer sequence TTCN PAM
cauuuucuugaggaugugac

SEQ ID NO: 29661 - RNA, 20 nt, Artificial Sequence
  HTT spacer sequence TTCN PAM
ugaggaugugaccaggaggg

SEQ ID NO: 29662 - RNA, 20 nt, Artificial Sequence
  HTT spacer sequence TTCN PAM
ugccccagaggcaggcacag

SEQ ID NO: 29663 - RNA, 20 nt, Artificial Sequence
  HTT spacer sequence TTCN PAM
ccagcaacuuccugccccag

SEQ ID NO: 29664 - RNA, 20 nt, Artificial Sequence
  HTT spacer sequence TTCN PAM
uuccccagcaacuuccugcc

SEQ ID NO: 29665 - RNA, 20 nt, Artificial Sequence
  HTT spacer sequence TTCN PAM
uccuuccccagcaacuuccu

SEQ ID NO: 29666 - RNA, 20 nt, Artificial Sequence
  HTT spacer sequence TTCN PAM
caaucuucuuccuuccccag

SEQ ID NO: 29667 - RNA, 20 nt, Artificial Sequence
  HTT spacer sequence TTCN PAM
ugccggcuggcaucaagggg

SEQ ID NO: 29668 - RNA, 20 nt, Artificial Sequence
  HTT spacer sequence TTCN PAM
agggcugguguccugagaag

SEQ ID NO: 29669 - RNA, 20 nt, Artificial Sequence
  HTT spacer sequence TTCN PAM
caggacaccagcccuggaau

SEQ ID NO: 29670 - RNA, 20 nt, Artificial Sequence
  HTT spacer sequence TTCN PAM
agggggccugggucccaagu

SEQ ID NO: 29671 - RNA, 20 nt, Artificial Sequence
  HTT spacer sequence TTCN PAM
aguacgaagcugggaaaagg

SEQ ID NO: 29672 - RNA, 20 nt, Artificial Sequence
  HTT spacer sequence TTCN PAM
uacuggaagggccaggaccc

SEQ ID NO: 29673 - RNA, 20 nt, Artificial Sequence
  HTT spacer sequence TTCN PAM
cagcuucguacuggaagggc

SEQ ID NO: 29674 - RNA, 20 nt, Artificial Sequence
  HTT spacer sequence TTCN PAM
cacagccugagcccucagcc

SEQ ID NO: 29675 - RNA, 20 nt, Artificial Sequence
  HTT spacer sequence TTCN PAM
aaaccagggugucuuucaca

SEQ ID NO: 29676 - RNA, 20 nt, Artificial Sequence
  HTT spacer sequence TTCN PAM
agcaggggcuggcuuauguu

SEQ ID NO: 29677 - RNA, 20 nt, Artificial Sequence
  HTT spacer sequence TTCN PAM
agcuuacucuggggucugga

SEQ ID NO: 29678 - RNA, 20 nt, Artificial Sequence
  HTT spacer sequence TTCN PAM
gcaguggucuccagacccca

SEQ ID NO: 29679 - RNA, 20 nt, Artificial Sequence
  HTT spacer sequence TTCN PAM
uguggccacugcuuggaggg

SEQ ID NO: 29680 - RNA, 20 nt, Artificial Sequence
  HTT spacer sequence TTCN PAM
ccagaccccgcccgagcucc

SEQ ID NO: 29681 - RNA, 20 nt, Artificial Sequence
  HTT spacer sequence TTCN PAM
gucuguggcagcccccaccc

SEQ ID NO: 29682 - RNA, 20 nt, Artificial Sequence
  HTT spacer sequence TTCN PAM
ucgaggcugcagaaggcugg

SEQ ID NO: 29683 - RNA, 20 nt, Artificial Sequence
  HTT spacer sequence TTCN PAM
gcagccucgacgaacccacu

SEQ ID NO: 29684 - RNA, 20 nt, Artificial Sequence
  HTT spacer sequence TTCN PAM
uccccuguagccccugugca

SEQ ID NO: 29685 - RNA, 20 nt, Artificial Sequence
  HTT spacer sequence TTCN PAM
ggcagacaguggcauggucc

SEQ ID NO: 29686 - RNA, 20 nt, Artificial Sequence
  HTT spacer sequence TTCN PAM
cuccccagggaggcagcucu

SEQ ID NO: 29687 - RNA, 20 nt, Artificial Sequence
  HTT spacer sequence TTCN PAM
cagccaggaggaggcccuag

SEQ ID NO: 29688 - RNA, 20 nt, Artificial Sequence
  HTT spacer sequence TTCN PAM
ccugggggcucuggggaggc

SEQ ID NO: 29689 - RNA, 20 nt, Artificial Sequence
  HTT spacer sequence TTCN PAM
ccccucugaggaaggaccug

SEQ ID NO: 29690 - RNA, 20 nt, Artificial Sequence
  HTT spacer sequence TTCN PAM
ucagaggggugaauggcucu

SEQ ID NO: 29691 - RNA, 20 nt, Artificial Sequence
  HTT spacer sequence TTCN PAM
gcccccggccaggucacccc

SEQ ID NO: 29692 - RNA, 20 nt, Artificial Sequence
  HTT spacer sequence TTCN PAM
ccaccugcaaacucccgccu

SEQ ID NO: 29693 - RNA, 20 nt, Artificial Sequence
  HTT spacer sequence TTCN PAM
uccagccguuccccaccugc

SEQ ID NO: 29694 - RNA, 20 nt, Artificial Sequence
  HTT spacer sequence TTCN PAM
acgaguuccuccagccguuc

SEQ ID NO: 29695 - RNA, 20 nt, Artificial Sequence
  HTT spacer sequence TTCN PAM
gcugcagccucagcagaggu

SEQ ID NO: 29696 - RNA, 20 nt, Artificial Sequence
  HTT spacer sequence TTCN PAM
ucccucggagccagccuguc

SEQ ID NO: 29697 - RNA, 20 nt, Artificial Sequence
  HTT spacer sequence TTCN PAM
caaggccaggccgcccacag

SEQ ID NO: 29698 - RNA, 20 nt, Artificial Sequence
  HTT spacer sequence TTCN PAM
cggcaggccgggcccaccgc

SEQ ID NO: 29699 - RNA, 20 nt, Artificial Sequence
  HTT spacer sequence TTCN PAM
gagaggcccagugaggacaa

SEQ ID NO: 29700 - RNA, 20 nt, Artificial Sequence
  HTT spacer sequence TTCN PAM
caggccccucacaacgcucc

SEQ ID NO: 29701 - RNA, 20 nt, Artificial Sequence
  HTT spacer sequence TTCN PAM
ggucacccaggcccccucug

SEQ ID NO: 29702 - RNA, 20 nt, Artificial Sequence
  HTT spacer sequence TTCN PAM
caggcugaggaggaacacac

SEQ ID NO: 29703 - RNA, 20 nt, Artificial Sequence
  HTT spacer sequence TTCN PAM
uccucagccugggaacccca

SEQ ID NO: 29704 - RNA, 20 nt, Artificial Sequence
  HTT spacer sequence TTCN PAM
ccaacccggggucuggccca

SEQ ID NO: 29705 - RNA, 20 nt, Artificial Sequence
  HTT spacer sequence TTCN PAM
uccuucuuuuugccucucug

SEQ ID NO: 29706 - RNA, 20 nt, Artificial Sequence
  HTT spacer sequence TTCN PAM
uucuuuuugccucucuguca

SEQ ID NO: 29707 - RNA, 20 nt, Artificial Sequence
  HTT spacer sequence TTCN PAM
uuuugccucucugucagcac

SEQ ID NO: 29708 - RNA, 20 nt, Artificial Sequence
  HTT spacer sequence TTCN PAM
uguugccucccucuugcucc

SEQ ID NO: 29709 - RNA, 20 nt, Artificial Sequence
  HTT spacer sequence TTCN PAM
ccuguccggccagagacccc

SEQ ID NO: 29710 - RNA, 20 nt, Artificial Sequence
  HTT spacer sequence TTCN PAM
uccuggggccacucacaggc

SEQ ID NO: 29711 - RNA, 20 nt, Artificial Sequence
  HTT spacer sequence TTCN PAM
ugucuaggcugggucuuguc

SEQ ID NO: 29712 - RNA, 20 nt, Artificial Sequence
  HTT spacer sequence TTCN PAM
uuaguaaauuuuagguuggc

SEQ ID NO: 29713 - RNA, 20 nt, Artificial Sequence
  HTT spacer sequence TTCN PAM
ugucauuuuuuauuccuuag

SEQ ID NO: 29714 - RNA, 20 nt, Artificial Sequence
  HTT spacer sequence TTCN PAM
gcuucuugucauuuuuuauu

SEQ ID NO: 29715 - RNA, 20 nt, Artificial Sequence
  HTT spacer sequence TTCN PAM
cuugccuucugcuucuuguc

SEQ ID NO: 29716 - RNA, 20 nt, Artificial Sequence
  HTT spacer sequence TTCN PAM
auucccuugccuucugcuuc

SEQ ID NO: 29717 - RNA, 20 nt, Artificial Sequence
  HTT spacer sequence TTCN PAM
uuuuuacucucuggguuuau

SEQ ID NO: 29718 - RNA, 20 nt, Artificial Sequence
  HTT spacer sequence TTCN PAM
cggauguuguucguuuuuac

SEQ ID NO: 29719 - RNA, 20 nt, Artificial Sequence
  HTT spacer sequence TTCN PAM
aacauggguuuuuuucccgg

SEQ ID NO: 29720 - RNA, 20 nt, Artificial Sequence
  HTT spacer sequence TTCN PAM
agaccagccugaccaccgug

SEQ ID NO: 29721 - RNA, 20 nt, Artificial Sequence
  HTT spacer sequence TTCN PAM
ccacgguggucaggcugguc

SEQ ID NO: 29722 - RNA, 20 nt, Artificial Sequence
  HTT spacer sequence TTCN PAM
cacgucucagccucccgagu

SEQ ID NO: 29723 - RNA, 20 nt, Artificial Sequence
  HTT spacer sequence TTCN PAM
agcaauucucacgucucagc

SEQ ID NO: 29724 - RNA, 20 nt, Artificial Sequence
  HTT spacer sequence TTCN PAM
agaccagccuggccaacaua

SEQ ID NO: 29725 - RNA, 20 nt, Artificial Sequence
  HTT spacer sequence TTCN PAM
cuauguuggccaggcugguc

SEQ ID NO: 29726 - RNA, 20 nt, Artificial Sequence
  HTT spacer sequence TTCN PAM
ccugccucagccuccuauag

SEQ ID NO: 29727 - RNA, 20 nt, Artificial Sequence
  HTT spacer sequence TTCN PAM
agcacuucuccugccucagc

SEQ ID NO: 29728 - RNA, 20 nt, Artificial Sequence
  HTT spacer sequence TTCN PAM
agccugggcaccaaagugag

SEQ ID NO: 29729 - RNA, 20 nt, Artificial Sequence
  HTT spacer sequence TTCN PAM
cuaacguuacgugugugugu

SEQ ID NO: 29730 - RNA, 20 nt, Artificial Sequence
  HTT spacer sequence TTCN PAM
cugugauccuuuuucccuaa

SEQ ID NO: 29731 - RNA, 20 nt, Artificial Sequence
  HTT spacer sequence TTCN PAM
gcugccuuaaugcauucgcu

SEQ ID NO: 29732 - RNA, 20 nt, Artificial Sequence
  HTT spacer sequence TTCN PAM
gcacuugaggguuaggucuu

SEQ ID NO: 29733 - RNA, 20 nt, Artificial Sequence
  HTT spacer sequence TTCN PAM
cucuguccacucauuucagc

SEQ ID NO: 29734 - RNA, 20 nt, Artificial Sequence
  HTT spacer sequence TTCN PAM
uggguaagcgaggggcccaa

SEQ ID NO: 29735 - RNA, 20 nt, Artificial Sequence
  HTT spacer sequence TTCN PAM
uaccguggcggucuuggcgg

SEQ ID NO: 29736 - RNA, 20 nt, Artificial Sequence
  HTT spacer sequence TTCN PAM
cucaucaccgugguacuuuu

SEQ ID NO: 29737 - RNA, 20 nt, Artificial Sequence
  HTT spacer sequence TTCN PAM
cugacuggcgccccuacugc

SEQ ID NO: 29738 - RNA, 20 nt, Artificial Sequence
  HTT spacer sequence TTCN PAM
cuuguuaucucgcccuggug

SEQ ID NO: 29739 - RNA, 20 nt, Artificial Sequence
  HTT spacer sequence TTCN PAM
agggccuagggacccagugc

SEQ ID NO: 29740 - RNA, 20 nt, Artificial Sequence
  HTT spacer sequence TTCN PAM
cucccugagccuugcuccgu

SEQ ID NO: 29741 - RNA, 20 nt, Artificial Sequence
  HTT spacer sequence TTCN PAM
cgccugggcuccagucccag

SEQ ID NO: 29742 - RNA, 20 nt, Artificial Sequence
  HTT spacer sequence TTCN PAM
cugggaugagcuccugggca

SEQ ID NO: 29743 - RNA, 20 nt, Artificial Sequence
  HTT spacer sequence TTCN PAM
aacuaagacccaccucuguc

SEQ ID NO: 29744 - RNA, 20 nt, Artificial Sequence
  HTT spacer sequence TTCN PAM
gacaugagagacagaggugg

SEQ ID NO: 29745 - RNA, 20 nt, Artificial Sequence
  HTT spacer sequence TTCN PAM
cuuaccugcaaccccagggc

SEQ ID NO: 29746 - RNA, 20 nt, Artificial Sequence
  HTT spacer sequence TTCN PAM
acaugaguuagccaagcaug

SEQ ID NO: 29747 - RNA, 20 nt, Artificial Sequence
  HTT spacer sequence TTCN PAM
acccagacacguugacacau

SEQ ID NO: 29748 - RNA, 20 nt, Artificial Sequence
  HTT spacer sequence TTCN PAM
ggccgaguggagugacacug

SEQ ID NO: 29749 - RNA, 20 nt, Artificial Sequence
  HTT spacer sequence TTCN PAM
gugggcucggcuggagucau

SEQ ID NO: 29750 - RNA, 20 nt, Artificial Sequence
  HTT spacer sequence TTCN PAM
accauucccuggccucgguu

SEQ ID NO: 29751 - RNA, 20 nt, Artificial Sequence
  HTT spacer sequence TTCN PAM
cuggccucgguuuccugcuc

SEQ ID NO: 29752 - RNA, 20 nt, Artificial Sequence
  HTT spacer sequence TTCN PAM
ugcucucgguuuccucagcu

SEQ ID NO: 29753 - RNA, 20 nt, Artificial Sequence
  HTT spacer sequence TTCN PAM
ucagcugccugguggguucc

SEQ ID NO: 29754 - RNA, 20 nt, Artificial Sequence
  HTT spacer sequence TTCN PAM
acugcaacucucuggggguc

SEQ ID NO: 29755 - RNA, 20 nt, Artificial Sequence
  HTT spacer sequence TTCN PAM
gucccggcaccgccugcucc

SEQ ID NO: 29756 - RNA, 20 nt, Artificial Sequence
  HTT spacer sequence TTCN PAM
ucauccgagucucugcggau

SEQ ID NO: 29757 - RNA, 20 nt, Artificial Sequence
  HTT spacer sequence TTCN PAM
ccaggaguaacuggggcagu

SEQ ID NO: 29758 - RNA, 20 nt, Artificial Sequence
  HTT spacer sequence TTCN PAM
uugcccgaguuuucucuagg

SEQ ID NO: 29759 - RNA, 20 nt, Artificial Sequence
  HTT spacer sequence TTCN PAM
cuagggugagcaccagacca

SEQ ID NO: 29760 - RNA, 20 nt, Artificial Sequence
  HTT spacer sequence TTCN PAM
ucaagggaaccagcagcauu

SEQ ID NO: 29761 - RNA, 20 nt, Artificial Sequence
  HTT spacer sequence TTCN PAM
agggaaccagcagcauugag

SEQ ID NO: 29762 - RNA, 20 nt, Artificial Sequence
  HTT spacer sequence TTCN PAM
cuugaagaaagaguggucug

SEQ ID NO: 29763 - RNA, 20 nt, Artificial Sequence
  HTT spacer sequence TTCN PAM
caaccagccuccccaggggc

SEQ ID NO: 29764 - RNA, 20 nt, Artificial Sequence
  HTT spacer sequence TTCN PAM
guuuuaaacugaucccaaga

SEQ ID NO: 29765 - RNA, 20 nt, Artificial Sequence
  HTT spacer sequence TTCN PAM
ccaggccuuccuguccugcu

SEQ ID NO: 29766 - RNA, 20 nt, Artificial Sequence
  HTT spacer sequence TTCN PAM
uguccugcugagcugggccc

SEQ ID NO: 29767 - RNA, 20 nt, Artificial Sequence
  HTT spacer sequence TTCN PAM
ucccuguaccccacauggcg

SEQ ID NO: 29768 - RNA, 20 nt, Artificial Sequence
  HTT spacer sequence TTCN PAM
uucugagagugggccugggg

SEQ ID NO: 29769 - RNA, 20 nt, Artificial Sequence
  HTT spacer sequence TTCN PAM
gagagugggccugggguuuc

SEQ ID NO: 29770 - RNA, 20 nt, Artificial Sequence
  HTT spacer sequence TTCN PAM
ccucuccuucuuacccaccc

SEQ ID NO: 29771 - RNA, 20 nt, Artificial Sequence
  HTT spacer sequence TTCN PAM
uacccaccccagagccaggc

SEQ ID NO: 29772 - RNA, 20 nt, Artificial Sequence
  HTT spacer sequence TTCN PAM
ugcugagccuggcucugggg

SEQ ID NO: 29773 - RNA, 20 nt, Artificial Sequence
  HTT spacer sequence TTCN PAM
gggcacccucagguuguguu

SEQ ID NO: 29774 - RNA, 20 nt, Artificial Sequence
  HTT spacer sequence TTCN PAM
cccgauuaggaccucgaggc

SEQ ID NO: 29775 - RNA, 20 nt, Artificial Sequence
  HTT spacer sequence TTCN PAM
gagugcgccagcucugugcc

SEQ ID NO: 29776 - RNA, 20 nt, Artificial Sequence
  HTT spacer sequence TTCN PAM
uugggggcucccugccccuc

SEQ ID NO: 29777 - RNA, 20 nt, Artificial Sequence
  HTT spacer sequence TTCN PAM
cugcccacagucaccucuug

SEQ ID NO: 29778 - RNA, 20 nt, Artificial Sequence
  HTT spacer sequence TTCN PAM
cacccacugugcccguggcc

SEQ ID NO: 29779 - RNA, 20 nt, Artificial Sequence
  HTT spacer sequence TTCN PAM
gcuuccucuagaugaggaag

SEQ ID NO: 29780 - RNA, 20 nt, Artificial Sequence
  HTT spacer sequence TTCN PAM
ucuagaugaggaaggugccc

SEQ ID NO: 29781 - RNA, 20 nt, Artificial Sequence
  HTT spacer sequence TTCN PAM
ucaucuagaggaagcagaag

SEQ ID NO: 29782 - RNA, 20 nt, Artificial Sequence
  HTT spacer sequence TTCN PAM
uaccuaagcacacccccugg

SEQ ID NO: 29783 - RNA, 20 nt, Artificial Sequence
  HTT spacer sequence TTCN PAM
aucucgggggaccccuggcu

SEQ ID NO: 29784 - RNA, 20 nt, Artificial Sequence
  HTT spacer sequence TTCN PAM
uccaucucgggggaccccug

SEQ ID NO: 29785 - RNA, 20 nt, Artificial Sequence
  HTT spacer sequence TTCN PAM
gcacaugagcccaugagcua

SEQ ID NO: 29786 - RNA, 20 nt, Artificial Sequence
  HTT spacer sequence TTCN PAM
agccagcugggguguggacg

SEQ ID NO: 29787 - RNA, 20 nt, Artificial Sequence
  HTT spacer sequence TTCN PAM
ugcugcaggaggcaccuggu

SEQ ID NO: 29788 - RNA, 20 nt, Artificial Sequence
  HTT spacer sequence TTCN PAM
ggcaccaaggacauggggga

SEQ ID NO: 29789 - RNA, 20 nt, Artificial Sequence
  HTT spacer sequence TTCN PAM
guggggagagaucucugcau

SEQ ID NO: 29790 - RNA, 20 nt, Artificial Sequence
  HTT spacer sequence TTCN PAM
gcaugucuguuggcuaucug

SEQ ID NO: 29791 - RNA, 20 nt, Artificial Sequence
  HTT spacer sequence TTCN PAM
cccacacaggcucaguccac

SEQ ID NO: 29792 - RNA, 20 nt, Artificial Sequence
  HTT spacer sequence TTCN PAM
agguggagggcacugcugcu

SEQ ID NO: 29793 - RNA, 20 nt, Artificial Sequence
  HTT spacer sequence TTCN PAM
cucucugcaccuuggcagca

SEQ ID NO: 29794 - RNA, 20 nt, Artificial Sequence
  HTT spacer sequence TTCN PAM
cagugccacaccccuucccu

SEQ ID NO: 29795 - RNA, 20 nt, Artificial Sequence
  HTT spacer sequence TTCN PAM
ggaggccaggcccgcaggca

SEQ ID NO: 29796 - RNA, 20 nt, Artificial Sequence
  HTT spacer sequence TTCN PAM
ugccugcgggccuggccucc

SEQ ID NO: 29797 - RNA, 20 nt, Artificial Sequence
  HTT spacer sequence TTCN PAM
uuccugccugcgggccuggc

SEQ ID NO: 29798 - RNA, 20 nt, Artificial Sequence
  HTT spacer sequence TTCN PAM
ucccuucccuugacacuaga

SEQ ID NO: 29799 - RNA, 20 nt, Artificial Sequence
  HTT spacer sequence TTCN PAM
cuugacacuagagcaagccc

SEQ ID NO: 29800 - RNA, 20 nt, Artificial Sequence
  HTT spacer sequence TTCN PAM
ucacuugagcagugggggug

SEQ ID NO: 29801 - RNA, 20 nt, Artificial Sequence
  HTT spacer sequence TTCN PAM
caccaaagccugcacgcuga

SEQ ID NO: 29802 - RNA, 20 nt, Artificial Sequence
  HTT spacer sequence TTCN PAM
gccugccaaggucacaugca

SEQ ID NO: 29803 - RNA, 20 nt, Artificial Sequence
  HTT spacer sequence TTCN PAM
cugucccucaccgcagccag

SEQ ID NO: 29804 - RNA, 20 nt, Artificial Sequence
  HTT spacer sequence TTCN PAM
ggccaggagaggcgaggcag

SEQ ID NO: 29805 - RNA, 20 nt, Artificial Sequence
  HTT spacer sequence TTCN PAM
uggcucccacccaaggcugg

SEQ ID NO: 29806 - RNA, 20 nt, Artificial Sequence
  HTT spacer sequence TTCN PAM
ccagaguccugauguguggg

SEQ ID NO: 29807 - RNA, 20 nt, Artificial Sequence
  HTT spacer sequence TTCN PAM
caagugauuaaaagguagaa

SEQ ID NO: 29808 - RNA, 20 nt, Artificial Sequence
  HTT spacer sequence TTCN PAM
accuuuuaaucacuugagaa

SEQ ID NO: 29809 - RNA, 20 nt, Artificial Sequence
  HTT spacer sequence TTCN PAM
caaacacugacgaguuucua

SEQ ID NO: 29810 - RNA, 20 nt, Artificial Sequence
  HTT spacer sequence TTCN PAM
ucacaaacacugacgaguuu

SEQ ID NO: 29811 - RNA, 20 nt, Artificial Sequence
  HTT spacer sequence TTCN PAM
guucuucacaaacacugacg

SEQ ID NO: 29812 - RNA, 20 nt, Artificial Sequence
  HTT spacer sequence TTCN PAM
cacuucaguucuucacaaac

SEQ ID NO: 29813 - RNA, 20 nt, Artificial Sequence
  HTT spacer sequence TTCN PAM
cccagacccaccucgccuug

SEQ ID NO: 29814 - RNA, 20 nt, Artificial Sequence
  HTT spacer sequence TTCN PAM
cugucuccagccccaccuca

SEQ ID NO: 29815 - RNA, 20 nt, Artificial Sequence
  HTT spacer sequence TTCN PAM
aggccgaggguggugagggu

SEQ ID NO: 29816 - RNA, 20 nt, Artificial Sequence
  HTT spacer sequence TTCN PAM
agguguggaggcccccgggc

SEQ ID NO: 29817 - RNA, 20 nt, Artificial Sequence
  HTT spacer sequence TTCN PAM
ugagaugggcaugggagucg

SEQ ID NO: 29818 - RNA, 20 nt, Artificial Sequence
  HTT spacer sequence TTCN PAM
uggggacagagacaccaggc

SEQ ID NO: 29819 - RNA, 20 nt, Artificial Sequence
  HTT spacer sequence TTCN PAM
ucucucaggccuggugucuc

SEQ ID NO: 29820 - RNA, 20 nt, Artificial Sequence
  HTT spacer sequence TTCN PAM
cacaucuccggaugccccac

SEQ ID NO: 29821 - RNA, 20 nt, Artificial Sequence
  HTT spacer sequence TTCN PAM
cucugaggacagagcuugag

SEQ ID NO: 29822 - RNA, 20 nt, Artificial Sequence
  HTT spacer sequence TTCN PAM
gagagcaaggccaagcuguu

SEQ ID NO: 29823 - RNA, 20 nt, Artificial Sequence
  HTT spacer sequence TTCN PAM
uaauucccuuuguccguugc

SEQ ID NO: 29824 - RNA, 20 nt, Artificial Sequence
  HTT spacer sequence TTCN PAM
cuuuguccguugcacacagc

SEQ ID NO: 29825 - RNA, 20 nt, Artificial Sequence
  HTT spacer sequence TTCN PAM
cagagcggugcaggguggag

SEQ ID NO: 29826 - RNA, 20 nt, Artificial Sequence
  HTT spacer sequence TTCN PAM
gggcucagaggccccagggg

SEQ ID NO: 29827 - RNA, 20 nt, Artificial Sequence
  HTT spacer sequence TTCN PAM
gggaacacugcugucuccag

SEQ ID NO: 29828 - RNA, 20 nt, Artificial Sequence
  HTT spacer sequence TTCN PAM
cagaagacgcaguguguucg

SEQ ID NO: 29829 - RNA, 20 nt, Artificial Sequence
  HTT spacer sequence TTCN PAM
cuguuuugcagcgagcagcc

SEQ ID NO: 29830 - RNA, 20 nt, Artificial Sequence
  HTT spacer sequence TTCN PAM
acaccccuggaccucugccc

SEQ ID NO: 29831 - RNA, 20 nt, Artificial Sequence
  HTT spacer sequence TTCN PAM
uugaaaaccucucucauuga

SEQ ID NO: 29832 - RNA, 20 nt, Artificial Sequence
  HTT spacer sequence TTCN PAM
aagaacuggagugcagcacg

SEQ ID NO: 29833 - RNA, 20 nt, Artificial Sequence
  HTT spacer sequence TTCN PAM
cucugagcucugaaggaugu

SEQ ID NO: 29834 - RNA, 20 nt, Artificial Sequence
  HTT spacer sequence TTCN PAM
gagcucagagugaaaaaauu

SEQ ID NO: 29835 - RNA, 20 nt, Artificial Sequence
  HTT spacer sequence TTCN PAM
cugucauguccauacaugag

SEQ ID NO: 29836 - RNA, 20 nt, Artificial Sequence
  HTT spacer sequence TTCN PAM
cuuggguccugccaugggcc

SEQ ID NO: 29837 - RNA, 20 nt, Artificial Sequence
  HTT spacer sequence TTCN PAM
gugggacuuggacccguggg

SEQ ID NO: 29838 - RNA, 20 nt, Artificial Sequence
  HTT spacer sequence TTCN PAM
gccaccagcauuaccccaug

SEQ ID NO: 29839 - RNA, 20 nt, Artificial Sequence
  HTT spacer sequence TTCN PAM
gagaagagggcaagguucua

SEQ ID NO: 29840 - RNA, 20 nt, Artificial Sequence
  HTT spacer sequence TTCN PAM
cugaaaucuccaagucaaug

SEQ ID NO: 29841 - RNA, 20 nt, Artificial Sequence
  HTT spacer sequence TTCN PAM
agaugguuccauccucaaag

SEQ ID NO: 29842 - RNA, 20 nt, Artificial Sequence
  HTT spacer sequence TTCN PAM
auccucaaaggaugagggag

SEQ ID NO: 29843 - RNA, 20 nt, Artificial Sequence
  HTT spacer sequence TTCN PAM
auguggaggugacugcaggu

SEQ ID NO: 29844 - RNA, 20 nt, Artificial Sequence
  HTT spacer sequence TTCN PAM
ugcccugggcccccgacacu

SEQ ID NO: 29845 - RNA, 20 nt, Artificial Sequence
  HTT spacer sequence TTCN PAM
cuuccugcccugggcccccg

SEQ ID NO: 29846 - RNA, 20 nt, Artificial Sequence
  HTT spacer sequence TTCN PAM
cuguccacguggauggggug

SEQ ID NO: 29847 - RNA, 20 nt, Artificial Sequence
  HTT spacer sequence TTCN PAM
ccacggcgcagcagcgaggu

SEQ ID NO: 29848 - RNA, 20 nt, Artificial Sequence
  HTT spacer sequence TTCN PAM
uugucucaggccacauucac

SEQ ID NO: 29849 - RNA, 20 nt, Artificial Sequence
  HTT spacer sequence TTCN PAM
ccccuuuggccugcccuucc

SEQ ID NO: 29850 - RNA, 20 nt, Artificial Sequence
  HTT spacer sequence TTCN PAM
ggaggcugugggcaccugcg

SEQ ID NO: 29851 - RNA, 20 nt, Artificial Sequence
  HTT spacer sequence TTCN PAM
uuguucccauguuugucucg

SEQ ID NO: 29852 - RNA, 20 nt, Artificial Sequence
  HTT spacer sequence TTCN PAM
cauguuugucucgugcugaa

SEQ ID NO: 29853 - RNA, 20 nt, Artificial Sequence
  HTT spacer sequence TTCN PAM
gcacgagacaaacaugggaa

SEQ ID NO: 29854 - RNA, 20 nt, Artificial Sequence
  HTT spacer sequence TTCN PAM
ugucuugauaaaaugucacc

SEQ ID NO: 29855 - RNA, 20 nt, Artificial Sequence
  HTT spacer sequence TTCN PAM
cguggagagggacaccagga

SEQ ID NO: 29856 - RNA, 20 nt, Artificial Sequence
  HTT spacer sequence TTCN PAM
cuggacacccugaguucccg

SEQ ID NO: 29857 - RNA, 20 nt, Artificial Sequence
  HTT spacer sequence TTCN PAM
cccucugcacaguggcagcc

SEQ ID NO: 29858 - RNA, 20 nt, Artificial Sequence
  HTT spacer sequence TTCN PAM
ggucaguggagccauucauu

SEQ ID NO: 29859 - RNA, 20 nt, Artificial Sequence
  HTT spacer sequence TTCN PAM
uucagcuccagcugccuuuc

SEQ ID NO: 29860 - RNA, 20 nt, Artificial Sequence
  HTT spacer sequence TTCN PAM
gcuccagcugccuuuccugg

SEQ ID NO: 29861 - RNA, 20 nt, Artificial Sequence
  HTT spacer sequence TTCN PAM
ugguguggguagaagcacgg

SEQ ID NO: 29862 - RNA, 20 nt, Artificial Sequence
  HTT spacer sequence TTCN PAM
acccacaccaggaaaggcag

SEQ ID NO: 29863 - RNA, 20 nt, Artificial Sequence
  HTT spacer sequence TTCN PAM
ccauauauagccgugcuucu

SEQ ID NO: 29864 - RNA, 20 nt, Artificial Sequence
  HTT spacer sequence TTCN PAM
ucaucagaaaccuggugcau

SEQ ID NO: 29865 - RNA, 20 nt, Artificial Sequence
  HTT spacer sequence TTCN PAM
gaugaugaaauaaagcaccu

SEQ ID NO: 29866 - RNA, 20 nt, Artificial Sequence
  HTT spacer sequence TTCN PAM
guuuguuuuuuaaacuaugc

SEQ ID NO: 29867 - RNA, 20 nt, Artificial Sequence
  HTT spacer sequence TTCN PAM
gugacuccgagcugcagcac

SEQ ID NO: 29868 - RNA, 20 nt, Artificial Sequence
  HTT spacer sequence TTCN PAM
ugcuuaggggccggccccca

SEQ ID NO: 29869 - RNA, 20 nt, Artificial Sequence
  HTT spacer sequence TTCN PAM
gcaggaggaagaaggggagc

SEQ ID NO: 29870 - RNA, 20 nt, Artificial Sequence
  HTT spacer sequence TTCN PAM
uccugcagaagcugaguuac

SEQ ID NO: 29871 - RNA, 20 nt, Artificial Sequence
  HTT spacer sequence TTCN PAM
uccuccugcagaagcugagu

SEQ ID NO: 29872 - RNA, 20 nt, Artificial Sequence
  HTT spacer sequence TTCN PAM
ccacgugguccgggcucuuu

SEQ ID NO: 29873 - RNA, 20 nt, Artificial Sequence
  HTT spacer sequence TTCN PAM
ggugagggcgcgggauggug

SEQ ID NO: 29874 - RNA, 20 nt, Artificial Sequence
  HTT spacer sequence TTCN PAM
gcccuggugagccuguggga

SEQ ID NO: 29875 - RNA, 20 nt, Artificial Sequence
  HTT spacer sequence TTCN PAM
cacaggcucaccagggcaga

SEQ ID NO: 29876 - RNA, 20 nt, Artificial Sequence
  HTT spacer sequence TTCN PAM
cccgcucagguggcuucggc

SEQ ID NO: 29877 - RNA, 20 nt, Artificial Sequence
  HTT spacer sequence TTCN PAM
gccgagggaagggggcucac

SEQ ID NO: 29878 - RNA, 20 nt, Artificial Sequence
  HTT spacer sequence TTCN PAM
cucggccgaagccaccugag

SEQ ID NO: 29879 - RNA, 20 nt, Artificial Sequence
  HTT spacer sequence TTCN PAM
cugcccgugcugggccuggg

SEQ ID NO: 29880 - RNA, 20 nt, Artificial Sequence
  HTT spacer sequence TTCN PAM
uccucaucggcuggggacgu

SEQ ID NO: 29881 - RNA, 20 nt, Artificial Sequence
  HTT spacer sequence TTCN PAM
cggcagcaacuuccccgcca

SEQ ID NO: 29882 - RNA, 20 nt, Artificial Sequence
  HTT spacer sequence TTCN PAM
ccgccaggguggauccgccg

SEQ ID NO: 29883 - RNA, 20 nt, Artificial Sequence
  HTT spacer sequence TTCN PAM
ucaucggccucaccauggcc

SEQ ID NO: 29884 - RNA, 20 nt, Artificial Sequence
  HTT spacer sequence TTCN PAM
ccugcuguaggcugggagcg

SEQ ID NO: 29885 - RNA, 20 nt, Artificial Sequence
  HTT spacer sequence TTCN PAM
uggggauggggguugcuucc

SEQ ID NO: 29886 - RNA, 20 nt, Artificial Sequence
  HTT spacer sequence TTCN PAM
cugaagcaggggcguuauuu

SEQ ID NO: 29887 - RNA, 20 nt, Artificial Sequence
  HTT spacer sequence TTCN PAM
gggaagcaacccccaucccc

SEQ ID NO: 29888 - RNA, 20 nt, Artificial Sequence
  HTT spacer sequence TTCN PAM
gggagacagcaggccgucgc

SEQ ID NO: 29889 - RNA, 20 nt, Artificial Sequence
  HTT spacer sequence TTCN PAM
guagguggguccccaucugg

SEQ ID NO: 29890 - RNA, 20 nt, Artificial Sequence
  HTT spacer sequence TTCN PAM
aguucaguaggugggucccc

SEQ ID NO: 29891 - RNA, 20 nt, Artificial Sequence
  HTT spacer sequence TTCN PAM
ucacacaccagcgcuuccag

SEQ ID NO: 29892 - RNA, 20 nt, Artificial Sequence
  HTT spacer sequence TTCN PAM
cgggccuggaguacacgcug

SEQ ID NO: 29893 - RNA, 20 nt, Artificial Sequence
  HTT spacer sequence TTCN PAM
uguucucgggccuggaguac

SEQ ID NO: 29894 - RNA, 20 nt, Artificial Sequence
  HTT spacer sequence TTCN PAM
ucuaccucuuccuguucucg

SEQ ID NO: 29895 - RNA, 20 nt, Artificial Sequence
  HTT spacer sequence TTCN PAM
cagcacgcgccaccucuccc

SEQ ID NO: 29896 - RNA, 20 nt, Artificial Sequence
  HTT spacer sequence TTCN PAM
cugcuguggucgccuucuca

SEQ ID NO: 29897 - RNA, 20 nt, Artificial Sequence
  HTT spacer sequence TTCN PAM
ccgggcggcgcccuucccug

SEQ ID NO: 29898 - RNA, 20 nt, Artificial Sequence
  HTT spacer sequence TTCN PAM
cggcugucgcucguggccag

SEQ ID NO: 29899 - RNA, 20 nt, Artificial Sequence
  HTT spacer sequence TTCN PAM
gugaugcggcugaucugcuc

SEQ ID NO: 29900 - RNA, 20 nt, Artificial Sequence
  HTT spacer sequence TTCN PAM
auagcgauguaaagugcccc

SEQ ID NO: 29901 - RNA, 20 nt, Artificial Sequence
  HTT spacer sequence TTCN PAM
ccaggggcagcgucucuggc

SEQ ID NO: 29902 - RNA, 20 nt, Artificial Sequence
  HTT spacer sequence TTCN PAM
ugccagagacgcugccccug

SEQ ID NO: 29903 - RNA, 20 nt, Artificial Sequence
  HTT spacer sequence TTCN PAM
gcuuccugccagagacgcug

SEQ ID NO: 29904 - RNA, 20 nt, Artificial Sequence
  HTT spacer sequence TTCN PAM
ucuucugcuuccugccagag

SEQ ID NO: 29905 - RNA, 20 nt, Artificial Sequence
  HTT spacer sequence TTCN PAM
cagccuccgaccugcuguuc

SEQ ID NO: 29906 - RNA, 20 nt, Artificial Sequence
  HTT spacer sequence TTCN PAM
aggggcagggaggcuccgag

SEQ ID NO: 29907 - RNA, 20 nt, Artificial Sequence
  HTT spacer sequence TTCN PAM
cccugggcccuaugcucgga

SEQ ID NO: 29908 - RNA, 20 nt, Artificial Sequence
  HTT spacer sequence TTCN PAM
cacugggcuucacccugggc

SEQ ID NO: 29909 - RNA, 20 nt, Artificial Sequence
  HTT spacer sequence TTCN PAM
cuaggcggucauuggggugg

SEQ ID NO: 29910 - RNA, 20 nt, Artificial Sequence
  HTT spacer sequence TTCN PAM
gggccugggucucccugugc

SEQ ID NO: 29911 - RNA, 20 nt, Artificial Sequence
  HTT spacer sequence TTCN PAM
cuuugcugaugcccccaauc

SEQ ID NO: 29912 - RNA, 20 nt, Artificial Sequence
  HTT spacer sequence TTCN PAM
uggccuccaggcugauuggg

SEQ ID NO: 29913 - RNA, 20 nt, Artificial Sequence
  HTT spacer sequence TTCN PAM
aagcaucugagggccacuug

SEQ ID NO: 29914 - RNA, 20 nt, Artificial Sequence
  HTT spacer sequence TTCN PAM
aaauagggcaggguugaggg

SEQ ID NO: 29915 - RNA, 20 nt, Artificial Sequence
  HTT spacer sequence TTCN PAM
cagugccuuccuaggggcca

SEQ ID NO: 29916 - RNA, 20 nt, Artificial Sequence
  HTT spacer sequence TTCN PAM
uaggggccaggagcagcucc

SEQ ID NO: 29917 - RNA, 20 nt, Artificial Sequence
  HTT spacer sequence TTCN PAM
aggagcugcuccuggccccu

SEQ ID NO: 29918 - RNA, 20 nt, Artificial Sequence
  HTT spacer sequence TTCN PAM
agagccaggcuuucaaggag

SEQ ID NO: 29919 - RNA, 20 nt, Artificial Sequence
  HTT spacer sequence TTCN PAM
cgggggaccaguggcuccug

SEQ ID NO: 29920 - RNA, 20 nt, Artificial Sequence
  HTT spacer sequence TTCN PAM
ccaugggcacccaggcccag

SEQ ID NO: 29921 - RNA, 20 nt, Artificial Sequence
  HTT spacer sequence TTCN PAM
ugggccugggugcccauggg

SEQ ID NO: 29922 - RNA, 20 nt, Artificial Sequence
  HTT spacer sequence TTCN PAM
gugugcgccacucacugggg

SEQ ID NO: 29923 - RNA, 20 nt, Artificial Sequence
  HTT spacer sequence TTCN PAM
cuguccugcaguuucugugu

SEQ ID NO: 29924 - RNA, 20 nt, Artificial Sequence
  HTT spacer sequence TTCN PAM
ucaucucuccauuggggccc

SEQ ID NO: 29925 - RNA, 20 nt, Artificial Sequence
  HTT spacer sequence TTCN PAM
gauccuuccucaucucucca

SEQ ID NO: 29926 - RNA, 20 nt, Artificial Sequence
  HTT spacer sequence TTCN PAM
gggcaugaucccuugccucc

SEQ ID NO: 29927 - RNA, 20 nt, Artificial Sequence
  HTT spacer sequence TTCN PAM
cacucccugggcuggcaugu

SEQ ID NO: 29928 - RNA, 20 nt, Artificial Sequence
  HTT spacer sequence TTCN PAM
cgguccuugccuucccacuc

SEQ ID NO: 29929 - RNA, 20 nt, Artificial Sequence
  HTT spacer sequence TTCN PAM
gagguauggcuggcucugug

SEQ ID NO: 29930 - RNA, 20 nt, Artificial Sequence
  HTT spacer sequence TTCN PAM
ccacuggcaucccgauggcg

SEQ ID NO: 29931 - RNA, 20 nt, Artificial Sequence
  HTT spacer sequence TTCN PAM
ucauccccuaggacccccuc

SEQ ID NO: 29932 - RNA, 20 nt, Artificial Sequence
  HTT spacer sequence TTCN PAM
cgcugcugcugccccugcug

SEQ ID NO: 29933 - RNA, 20 nt, Artificial Sequence
  HTT spacer sequence TTCN PAM
cggccuccugcuggaccucc

SEQ ID NO: 29934 - RNA, 20 nt, Artificial Sequence
  HTT spacer sequence TTCN PAM
ccgcuaacccgacccgccgc

SEQ ID NO: 29935 - RNA, 20 nt, Artificial Sequence
  HTT spacer sequence TTCN PAM
ggccugcgcgaugcccccgc

SEQ ID NO: 29936 - RNA, 20 nt, Artificial Sequence
  HTT spacer sequence TTCN PAM
gggcgggggcaucgcgcagg

SEQ ID NO: 29937 - RNA, 20 nt, Artificial Sequence
  HTT spacer sequence TTCN PAM
ugcugccuggguucggggcg

SEQ ID NO: 29938 - RNA, 20 nt, Artificial Sequence
  HTT spacer sequence TTCN PAM
gggauugcacaaaaaauagc

SEQ ID NO: 29939 - RNA, 20 nt, Artificial Sequence
  HTT spacer sequence TTCN PAM
cucgcuguuacgagggcgug

SEQ ID NO: 29940 - RNA, 20 nt, Artificial Sequence
  HTT spacer sequence TTCN PAM
aguuuucucucgcuguuacg

SEQ ID NO: 29941 - RNA, 20 nt, Artificial Sequence
  HTT spacer sequence TTCN PAM
ccgcggcuucaaguuuucuc

SEQ ID NO: 29942 - RNA, 20 nt, Artificial Sequence
  HTT spacer sequence TTCN PAM
ggccccuggcccggacucgg

SEQ ID NO: 29943 - RNA, 20 nt, Artificial Sequence
  HTT spacer sequence TTCN PAM
gcgucugugcgaccguccgu

SEQ ID NO: 29944 - RNA, 20 nt, Artificial Sequence
  HTT spacer sequence TTCN PAM
ggggcguggcguggccgggc

SEQ ID NO: 29945 - RNA, 20 nt, Artificial Sequence
  HTT spacer sequence TTCN PAM
cuuccggccggagucagugg

SEQ ID NO: 29946 - RNA, 20 nt, Artificial Sequence
  HTT spacer sequence TTCN PAM
ggccggagucaguggcgggg

SEQ ID NO: 29947 - RNA, 20 nt, Artificial Sequence
  HTT spacer sequence TTCN PAM
cgccgguccugcgggucgcu

SEQ ID NO: 29948 - RNA, 20 nt, Artificial Sequence
  HTT spacer sequence TTCN PAM
gcuccgcucagggugcugcu

SEQ ID NO: 29949 - RNA, 20 nt, Artificial Sequence
  HTT spacer sequence TTCN PAM
acggggagggccaggcccgc

SEQ ID NO: 29950 - RNA, 20 nt, Artificial Sequence
  HTT spacer sequence TTCN PAM
gggccccacgcuggggggcu

SEQ ID NO: 29951 - RNA, 20 nt, Artificial Sequence
  HTT spacer sequence TTCN PAM
gcucgggcugcgugagcuga

SEQ ID NO: 29952 - RNA, 20 nt, Artificial Sequence
  HTT spacer sequence TTCN PAM
ggcucagcaccaaacgcagc

SEQ ID NO: 29953 - RNA, 20 nt, Artificial Sequence
  HTT spacer sequence TTCN PAM
cccucagccgccuguccugg

SEQ ID NO: 29954 - RNA, 20 nt, Artificial Sequence
  HTT spacer sequence TTCN PAM
caccaucuuucccccucagc

SEQ ID NO: 29955 - RNA, 20 nt, Artificial Sequence
  HTT spacer sequence TTCN PAM
guugucucugcccacccaau

SEQ ID NO: 29956 - RNA, 20 nt, Artificial Sequence
  HTT spacer sequence TTCN PAM
ggugacccagggagcggggc

SEQ ID NO: 29957 - RNA, 20 nt, Artificial Sequence
  HTT spacer sequence TTCN PAM
gggcgcagaagcacccgacc

SEQ ID NO: 29958 - RNA, 20 nt, Artificial Sequence
  HTT spacer sequence TTCN PAM
gcgcccggaaagagcgccag

SEQ ID NO: 29959 - RNA, 20 nt, Artificial Sequence
  HTT spacer sequence TTCN PAM
uccagcgugggucgggugcu

SEQ ID NO: 29960 - RNA, 20 nt, Artificial Sequence
  HTT spacer sequence TTCN PAM
ccugcccagagggaccguuu

SEQ ID NO: 29961 - RNA, 20 nt, Artificial Sequence
  HTT spacer sequence TTCN PAM
gugagugugcuccagccagg

SEQ ID NO: 29962 - RNA, 20 nt, Artificial Sequence
  HTT spacer sequence TTCN PAM
aaaaugcuugcggaucucac

SEQ ID NO: 29963 - RNA, 20 nt, Artificial Sequence
  HTT spacer sequence TTCN PAM
ccauguguaucugguuaggg

SEQ ID NO: 29964 - RNA, 20 nt, Artificial Sequence
  HTT spacer sequence TTCN PAM
uuuccccauguguaucuggu

SEQ ID NO: 29965 - RNA, 20 nt, Artificial Sequence
  HTT spacer sequence TTCN PAM
cuauggaguaaaggcgguau

SEQ ID NO: 29966 - RNA, 20 nt, Artificial Sequence
  HTT spacer sequence TTCN PAM
aauuguggguaagaacaaag

SEQ ID NO: 29967 - RNA, 20 nt, Artificial Sequence
  HTT spacer sequence TTCN PAM
uacccacaauuggaaguucu

SEQ ID NO: 29968 - RNA, 20 nt, Artificial Sequence
  HTT spacer sequence TTCN PAM
uaauagaugcaguuuuccac

SEQ ID NO: 29969 - RNA, 20 nt, Artificial Sequence
  HTT spacer sequence TTCN PAM
accugcagccaaaaagacaa

SEQ ID NO: 29970 - RNA, 20 nt, Artificial Sequence
  HTT spacer sequence TTCN PAM
cagaggacaggcaucucuau

SEQ ID NO: 29971 - RNA, 20 nt, Artificial Sequence
  HTT spacer sequence TTCN PAM
uagagaugccuguccucugg

SEQ ID NO: 29972 - RNA, 20 nt, Artificial Sequence
  HTT spacer sequence TTCN PAM
aaccuccaugcccuccuugu

SEQ ID NO: 29973 - RNA, 20 nt, Artificial Sequence
  HTT spacer sequence TTCN PAM
accugcgugcagcaguaaac

SEQ ID NO: 29974 - RNA, 20 nt, Artificial Sequence
  HTT spacer sequence TTCN PAM
ucccacaguucaaccugcgu

SEQ ID NO: 29975 - RNA, 20 nt, Artificial Sequence
  HTT spacer sequence TTCN PAM
caaaggaaaccuuuccuggg

SEQ ID NO: 29976 - RNA, 20 nt, Artificial Sequence
  HTT spacer sequence TTCN PAM
uuugggaaagggcuguuauc

SEQ ID NO: 29977 - RNA, 20 nt, Artificial Sequence
  HTT spacer sequence TTCN PAM
uggggauuagccugcuuuug

SEQ ID NO: 29978 - RNA, 20 nt, Artificial Sequence
  HTT spacer sequence TTCN PAM
aaucuuguggcuaaucuguu

SEQ ID NO: 29979 - RNA, 20 nt, Artificial Sequence
  HTT spacer sequence TTCN PAM
accguaguuucuaaucuugu

SEQ ID NO: 29980 - RNA, 20 nt, Artificial Sequence
  HTT spacer sequence TTCN PAM
gacccuccccaaacugcucc

SEQ ID NO: 29981 - RNA, 20 nt, Artificial Sequence
  HTT spacer sequence TTCN PAM
ugggugccacaacaucagau

SEQ ID NO: 29982 - RNA, 20 nt, Artificial Sequence
  HTT spacer sequence TTCN PAM
cacugagucaguuccugggu

SEQ ID NO: 29983 - RNA, 20 nt, Artificial Sequence
  HTT spacer sequence TTCN PAM
acucccugugauuucaucuc

SEQ ID NO: 29984 - RNA, 20 nt, Artificial Sequence
  HTT spacer sequence TTCN PAM
ucucugaccugaccaauggg

SEQ ID NO: 29985 - RNA, 20 nt, Artificial Sequence
  HTT spacer sequence TTCN PAM
gacucacuggcugcccccca

SEQ ID NO: 29986 - RNA, 20 nt, Artificial Sequence
  HTT spacer sequence TTCN PAM
cgcagagcuagcuguguggg

SEQ ID NO: 29987 - RNA, 20 nt, Artificial Sequence
  HTT spacer sequence TTCN PAM
cuguugcaaaugcccuuucu

SEQ ID NO: 29988 - RNA, 20 nt, Artificial Sequence
  HTT spacer sequence TTCN PAM
ugauaaauuggcugucuagg

SEQ ID NO: 29989 - RNA, 20 nt, Artificial Sequence
  HTT spacer sequence TTCN PAM
cuguuaccuagacagccaau

SEQ ID NO: 29990 - RNA, 20 nt, Artificial Sequence
  HTT spacer sequence TTCN PAM
ccuucccuguuaccuagaca

SEQ ID NO: 29991 - RNA, 20 nt, Artificial Sequence
  HTT spacer sequence TTCN PAM
agcuggaucacgcgcccucu

SEQ ID NO: 29992 - RNA, 20 nt, Artificial Sequence
  HTT spacer sequence TTCN PAM
augacaugacacgcagcuag

SEQ ID NO: 29993 - RNA, 20 nt, Artificial Sequence
  HTT spacer sequence TTCN PAM
guccuggaucgcauagcaag

SEQ ID NO: 29994 - RNA, 20 nt, Artificial Sequence
  HTT spacer sequence TTCN PAM
guccuguucucguuuccucu

SEQ ID NO: 29995 - RNA, 20 nt, Artificial Sequence
  HTT spacer sequence TTCN PAM
cguuuccucuuugcuuggcc

SEQ ID NO: 29996 - RNA, 20 nt, Artificial Sequence
  HTT spacer sequence TTCN PAM
ucuuugcuuggccaaagagg

SEQ ID NO: 29997 - RNA, 20 nt, Artificial Sequence
  HTT spacer sequence TTCN PAM
ccaagccaagccuuugcacu

SEQ ID NO: 29998 - RNA, 20 nt, Artificial Sequence
  HTT spacer sequence TTCN PAM
cugccacacggcuacugcca

SEQ ID NO: 29999 - RNA, 20 nt, Artificial Sequence
  HTT spacer sequence TTCN PAM
cccaucuacaaauuuucucu

SEQ ID NO: 30000 - RNA, 20 nt, Artificial Sequence
  HTT spacer sequence TTCN PAM
agauuuguggauccgugcac

SEQ ID NO: 30001 - RNA, 20 nt, Artificial Sequence
  HTT spacer sequence TTCN PAM
cccgucagggccugagccuc

SEQ ID NO: 30002 - RNA, 20 nt, Artificial Sequence
  HTT spacer sequence TTCN PAM
gcccagcugccaccagcgcu

SEQ ID NO: 30003 - RNA, 20 nt, Artificial Sequence
  HTT spacer sequence TTCN PAM
agagagagacugacucauuu

SEQ ID NO: 30004 - RNA, 20 nt, Artificial Sequence
  HTT spacer sequence TTCN PAM
agccauggcuggaccagagc

SEQ ID NO: 30005 - RNA, 20 nt, Artificial Sequence
  HTT spacer sequence TTCN PAM
uguugggagguguucaagcc

SEQ ID NO: 30006 - RNA, 20 nt, Artificial Sequence
  HTT spacer sequence TTCN PAM
cccuagcaucuucuuccuug

SEQ ID NO: 30007 - RNA, 20 nt, Artificial Sequence
  HTT spacer sequence TTCN PAM
uccuugcucaaagaucccac

SEQ ID NO: 30008 - RNA, 20 nt, Artificial Sequence
  HTT spacer sequence TTCN PAM
uugcucaaagaucccacacc

SEQ ID NO: 30009 - RNA, 20 nt, Artificial Sequence
  HTT spacer sequence TTCN PAM
aacggggugugggaucuuug

SEQ ID NO: 30010 - RNA, 20 nt, Artificial Sequence
  HTT spacer sequence TTCN PAM
agcuucuaacgggguguggg

SEQ ID NO: 30011 - RNA, 20 nt, Artificial Sequence
  HTT spacer sequence TTCN PAM
ucaccuccccagucguaguc

SEQ ID NO: 30012 - RNA, 20 nt, Artificial Sequence
  HTT spacer sequence TTCN PAM
ggcacguaccagggcagccu

SEQ ID NO: 30013 - RNA, 20 nt, Artificial Sequence
  HTT spacer sequence TTCN PAM
caccucaugagaucacagug

SEQ ID NO: 30014 - RNA, 20 nt, Artificial Sequence
  HTT spacer sequence TTCN PAM
uuccugggaugccggcuaag

SEQ ID NO: 30015 - RNA, 20 nt, Artificial Sequence
  HTT spacer sequence TTCN PAM
ugggaugccggcuaaggaca

SEQ ID NO: 30016 - RNA, 20 nt, Artificial Sequence
  HTT spacer sequence TTCN PAM
guguuugcccuggcuuguag

SEQ ID NO: 30017 - RNA, 20 nt, Artificial Sequence
  HTT spacer sequence TTCN PAM
ccaggggaugacggagcccc

SEQ ID NO: 30018 - RNA, 20 nt, Artificial Sequence
  HTT spacer sequence TTCN PAM
aaugcgguaugcggucuugc

SEQ ID NO: 30019 - RNA, 20 nt, Artificial Sequence
  HTT spacer sequence TTCN PAM
cuguuccaaugcgguaugcg

SEQ ID NO: 30020 - RNA, 20 nt, Artificial Sequence
  HTT spacer sequence TTCN PAM
gcaccucccucagcaaggug

SEQ ID NO: 30021 - RNA, 20 nt, Artificial Sequence
  HTT spacer sequence TTCN PAM
ucguggugcaaggcuuguug

SEQ ID NO: 30022 - RNA, 20 nt, Artificial Sequence
  HTT spacer sequence TTCN PAM
ggauauggcucccuggccag

SEQ ID NO: 30023 - RNA, 20 nt, Artificial Sequence
  HTT spacer sequence TTCN PAM
caagcuggccagggagccau

SEQ ID NO: 30024 - RNA, 20 nt, Artificial Sequence
  HTT spacer sequence TTCN PAM
aggggcucguuacuucuuac

SEQ ID NO: 30025 - RNA, 20 nt, Artificial Sequence
  HTT spacer sequence TTCN PAM
uacagcucacagucccuccc

SEQ ID NO: 30026 - RNA, 20 nt, Artificial Sequence
  HTT spacer sequence TTCN PAM
ccugcacuaaucaagaggga

SEQ ID NO: 30027 - RNA, 20 nt, Artificial Sequence
  HTT spacer sequence TTCN PAM
gauucugaccugaaacugca

SEQ ID NO: 30028 - RNA, 20 nt, Artificial Sequence
  HTT spacer sequence TTCN PAM
gaccugaaacugcaucccag

SEQ ID NO: 30029 - RNA, 20 nt, Artificial Sequence
  HTT spacer sequence TTCN PAM
ggucagaaucagaagaugug

SEQ ID NO: 30030 - RNA, 20 nt, Artificial Sequence
  HTT spacer sequence TTCN PAM
ggacacugcacucucggagg

SEQ ID NO: 30031 - RNA, 20 nt, Artificial Sequence
  HTT spacer sequence TTCN PAM
ccauucaggacacugcacuc

SEQ ID NO: 30032 - RNA, 20 nt, Artificial Sequence
  HTT spacer sequence TTCN PAM
gggugcugggguucuccauu

SEQ ID NO: 30033 - RNA, 20 nt, Artificial Sequence
  HTT spacer sequence TTCN PAM
guggaugcuucugggugcug

SEQ ID NO: 30034 - RNA, 20 nt, Artificial Sequence
  HTT spacer sequence TTCN PAM
agcagagggacuguggguga

SEQ ID NO: 30035 - RNA, 20 nt, Artificial Sequence
  HTT spacer sequence TTCN PAM
cuucucugauuucuaaaaua

SEQ ID NO: 30036 - RNA, 20 nt, Artificial Sequence
  HTT spacer sequence TTCN PAM
cugauuucuaaaauaucugc

SEQ ID NO: 30037 - RNA, 20 nt, Artificial Sequence
  HTT spacer sequence TTCN PAM
aaaauaucugcaaacuuguu

SEQ ID NO: 30038 - RNA, 20 nt, Artificial Sequence
  HTT spacer sequence TTCN PAM
uuuauaauugaaaauauaau

SEQ ID NO: 30039 - RNA, 20 nt, Artificial Sequence
  HTT spacer sequence TTCN PAM
auuauaaaugaaacaaguuu

SEQ ID NO: 30040 - RNA, 20 nt, Artificial Sequence
  HTT spacer sequence TTCN PAM
acacaugaaggcaaacgucc

SEQ ID NO: 30041 - RNA, 20 nt, Artificial Sequence
  HTT spacer sequence TTCN PAM
uguguagaauuuacuguugu

SEQ ID NO: 30042 - RNA, 20 nt, Artificial Sequence
  HTT spacer sequence TTCN PAM
gucaaccacggacguuugcc

SEQ ID NO: 30043 - RNA, 20 nt, Artificial Sequence
  HTT spacer sequence TTCN PAM
ggccaguguaauuucuguca

SEQ ID NO: 30044 - RNA, 20 nt, Artificial Sequence
  HTT spacer sequence TTCN PAM
cugcgucuggacaagccuca

SEQ ID NO: 30045 - RNA, 20 nt, Artificial Sequence
  HTT spacer sequence TTCN PAM
cgaucccagaggugcauuuc

SEQ ID NO: 30046 - RNA, 20 nt, Artificial Sequence
  HTT spacer sequence TTCN PAM
ggauucauucuauuucauca

SEQ ID NO: 30047 - RNA, 20 nt, Artificial Sequence
  HTT spacer sequence TTCN PAM
uucuauuucaucaggugacg

SEQ ID NO: 30048 - RNA, 20 nt, Artificial Sequence
  HTT spacer sequence TTCN PAM
auuucaucaggugacguuuu

SEQ ID NO: 30049 - RNA, 20 nt, Artificial Sequence
  HTT spacer sequence TTCN PAM
ucaggugacguuuuaacaga

SEQ ID NO: 30050 - RNA, 20 nt, Artificial Sequence
  HTT spacer sequence TTCN PAM
guuaaaacgucaccugauga

SEQ ID NO: 30051 - RNA, 20 nt, Artificial Sequence
  HTT spacer sequence TTCN PAM
aaccuccagcuccccccacc

SEQ ID NO: 30052 - RNA, 20 nt, Artificial Sequence
  HTT spacer sequence TTCN PAM
gguuguagccucgaguuugg

SEQ ID NO: 30053 - RNA, 20 nt, Artificial Sequence
  HTT spacer sequence TTCN PAM
uuaacaguggcuuucugguu

SEQ ID NO: 30054 - RNA, 20 nt, Artificial Sequence
  HTT spacer sequence TTCN PAM
cuccguagucaucugcucaa

SEQ ID NO: 30055 - RNA, 20 nt, Artificial Sequence
  HTT spacer sequence TTCN PAM
gcaguugagcagaugacuac

SEQ ID NO: 30056 - RNA, 20 nt, Artificial Sequence
  HTT spacer sequence TTCN PAM
caccccggcuggucaaagug

SEQ ID NO: 30057 - RNA, 20 nt, Artificial Sequence
  HTT spacer sequence TTCN PAM
gugggacaggcuugcucuuc

SEQ ID NO: 30058 - RNA, 20 nt, Artificial Sequence
  HTT spacer sequence TTCN PAM
cacaggucagcggccggcag

SEQ ID NO: 30059 - RNA, 20 nt, Artificial Sequence
  HTT spacer sequence TTCN PAM
ggcuuuccauuucggucagu

SEQ ID NO: 30060 - RNA, 20 nt, Artificial Sequence
  HTT spacer sequence TTCN PAM
auuucggucagugugcucug

SEQ ID NO: 30061 - RNA, 20 nt, Artificial Sequence
  HTT spacer sequence TTCN PAM
gucagugugcucugacacag

SEQ ID NO: 30062 - RNA, 20 nt, Artificial Sequence
  HTT spacer sequence TTCN PAM
ggagcugugucagagcacac

SEQ ID NO: 30063 - RNA, 20 nt, Artificial Sequence
  HTT spacer sequence TTCN PAM
uguuuuucaggagcuguguc

SEQ ID NO: 30064 - RNA, 20 nt, Artificial Sequence
  HTT spacer sequence TTCN PAM
guggugucaaggcagcguga

SEQ ID NO: 30065 - RNA, 20 nt, Artificial Sequence
  HTT spacer sequence TTCN PAM
ggcugugccaggacuugagc

SEQ ID NO: 30066 - RNA, 20 nt, Artificial Sequence
  HTT spacer sequence TTCN PAM
uuccggcugugccaggacuu

SEQ ID NO: 30067 - RNA, 20 nt, Artificial Sequence
  HTT spacer sequence TTCN PAM
ugaagagggagggccguggg

SEQ ID NO: 30068 - RNA, 20 nt, Artificial Sequence
  HTT spacer sequence TTCN PAM
agaagacaguggcuuuacuu

SEQ ID NO: 30069 - RNA, 20 nt, Artificial Sequence
  HTT spacer sequence TTCN PAM
gagagugcucucaggggcca

SEQ ID NO: 30070 - RNA, 20 nt, Artificial Sequence
  HTT spacer sequence TTCN PAM
ggcugugaggagcacaggcu

SEQ ID NO: 30071 - RNA, 20 nt, Artificial Sequence
  HTT spacer sequence TTCN PAM
guugacguuucuggcuguga

SEQ ID NO: 30072 - RNA, 20 nt, Artificial Sequence
  HTT spacer sequence TTCN PAM
cagacaaacuuggcacgaaa

SEQ ID NO: 30073 - RNA, 20 nt, Artificial Sequence
  HTT spacer sequence TTCN PAM
ugccaaguuugucugggaaa

SEQ ID NO: 30074 - RNA, 20 nt, Artificial Sequence
  HTT spacer sequence TTCN PAM
cuucauauuugugauuuugc

SEQ ID NO: 30075 - RNA, 20 nt, Artificial Sequence
  HTT spacer sequence TTCN PAM
uauuugugauuuugcaaaga

SEQ ID NO: 30076 - RNA, 20 nt, Artificial Sequence
  HTT spacer sequence TTCN PAM
cggccacuagggugcucugc

SEQ ID NO: 30077 - RNA, 20 nt, Artificial Sequence
  HTT spacer sequence TTCN PAM
acgccaucauggggccucuc

SEQ ID NO: 30078 - RNA, 20 nt, Artificial Sequence
  HTT spacer sequence TTCN PAM
gcagggccaggcccacagcc

SEQ ID NO: 30079 - RNA, 20 nt, Artificial Sequence
  HTT spacer sequence TTCN PAM
acagaggccaaucacauccg

SEQ ID NO: 30080 - RNA, 20 nt, Artificial Sequence
  HTT spacer sequence TTCN PAM
gaguucuucccaagcgcucu

SEQ ID NO: 30081 - RNA, 20 nt, Artificial Sequence
  HTT spacer sequence TTCN PAM
ucccaagcgcucugaaaggg

SEQ ID NO: 30082 - RNA, 20 nt, Artificial Sequence
  HTT spacer sequence TTCN PAM
caagcgcucugaaagggugc

SEQ ID NO: 30083 - RNA, 20 nt, Artificial Sequence
  HTT spacer sequence TTCN PAM
gagcgcuugggaagaacucg

SEQ ID NO: 30084 - RNA, 20 nt, Artificial Sequence
  HTT spacer sequence TTCN PAM
acucuggugcacccuuucag

SEQ ID NO: 30085 - RNA, 20 nt, Artificial Sequence
  HTT spacer sequence TTCN PAM
gguuccacucuggugcaccc

SEQ ID NO: 30086 - RNA, 20 nt, Artificial Sequence
  HTT spacer sequence TTCN PAM
aagugcgacaggacagagau

SEQ ID NO: 30087 - RNA, 20 nt, Artificial Sequence
  HTT spacer sequence TTCN PAM
ggccaucucuguccugucgc

SEQ ID NO: 30088 - RNA, 20 nt, Artificial Sequence
  HTT spacer sequence TTCN PAM
uacaaauauguuauacuuua

SEQ ID NO: 30089 - RNA, 20 nt, Artificial Sequence
  HTT spacer sequence TTCN PAM
uuacauagcaacuccaaaca

SEQ ID NO: 30090 - RNA, 20 nt, Artificial Sequence
  HTT spacer sequence TTCN PAM
ugggauucuuuacauagcaa

SEQ ID NO: 30091 - RNA, 20 nt, Artificial Sequence
  HTT spacer sequence TTCN PAM
ucuugggauucuuuacauag

SEQ ID NO: 30092 - RNA, 20 nt, Artificial Sequence
  HTT spacer sequence TTCN PAM
uggaguauguggcuuugucc

SEQ ID NO: 30093 - RNA, 20 nt, Artificial Sequence
  HTT spacer sequence TTCN PAM
ugugcugccuguuccuggag

SEQ ID NO: 30094 - RNA, 20 nt, Artificial Sequence
  HTT spacer sequence TTCN PAM
ccacguccuggagggacagg

SEQ ID NO: 30095 - RNA, 20 nt, Artificial Sequence
  HTT spacer sequence TTCN PAM
agugccccauccugucccuc

SEQ ID NO: 30096 - RNA, 20 nt, Artificial Sequence
  HTT spacer sequence TTCN PAM
uuuccagugccccauccugu

SEQ ID NO: 30097 - RNA, 20 nt, Artificial Sequence
  HTT spacer sequence TTCN PAM
cuccacaugcggcagggguc

SEQ ID NO: 30098 - RNA, 20 nt, Artificial Sequence
  HTT spacer sequence TTCN PAM
ggcacccaguggugaccccu

SEQ ID NO: 30099 - RNA, 20 nt, Artificial Sequence
  HTT spacer sequence TTCN PAM
gacuucuggcacccaguggu

SEQ ID NO: 30100 - RNA, 20 nt, Artificial Sequence
  HTT spacer sequence TTCN PAM
aacuuccgacuucuggcacc

SEQ ID NO: 30101 - RNA, 20 nt, Artificial Sequence
  HTT spacer sequence TTCN PAM
aauaaaugagcuggaaagaa

SEQ ID NO: 30102 - RNA, 20 nt, Artificial Sequence
  HTT spacer sequence TTCN PAM
agcucauuuauuugaaaauc

SEQ ID NO: 30103 - RNA, 20 nt, Artificial Sequence
  HTT spacer sequence TTCN PAM
uuccagcucauuuauuugaa

SEQ ID NO: 30104 - RNA, 20 nt, Artificial Sequence
  HTT spacer sequence TTCN PAM
uuaaccugugguaacacuuu

SEQ ID NO: 30105 - RNA, 20 nt, Artificial Sequence
  HTT spacer sequence TTCN PAM
guggcaggggcagugccuag

SEQ ID NO: 30106 - RNA, 20 nt, Artificial Sequence
  HTT spacer sequence TTCN PAM
gucuaggcacugccccugcc

SEQ ID NO: 30107 - RNA, 20 nt, Artificial Sequence
  HTT spacer sequence TTCN PAM
uccaucucaugcaucgcauc

SEQ ID NO: 30108 - RNA, 20 nt, Artificial Sequence
  HTT spacer sequence TTCN PAM
aucucaugcaucgcaucucg

SEQ ID NO: 30109 - RNA, 20 nt, Artificial Sequence
  HTT spacer sequence TTCN PAM
ccgagaugcgaugcaugaga

SEQ ID NO: 30110 - RNA, 20 nt, Artificial Sequence
  HTT spacer sequence TTCN PAM
ggaaacaucuggcaaagaug

SEQ ID NO: 30111 - RNA, 20 nt, Artificial Sequence
  HTT spacer sequence TTCN PAM
ugaaucugcaagugacgcua

SEQ ID NO: 30112 - RNA, 20 nt, Artificial Sequence
  HTT spacer sequence TTCN PAM
gcuuaacaggcacuuauauc

SEQ ID NO: 30113 - RNA, 20 nt, Artificial Sequence
  HTT spacer sequence TTCN PAM
cuccugacuuuacauuucug

SEQ ID NO: 30114 - RNA, 20 nt, Artificial Sequence
  HTT spacer sequence TTCN PAM
uaucuaaagucauucucucc

SEQ ID NO: 30115 - RNA, 20 nt, Artificial Sequence
  HTT spacer sequence TTCN PAM
aaaagaaagccaaacaguuu

SEQ ID NO: 30116 - RNA, 20 nt, Artificial Sequence
  HTT spacer sequence TTCN PAM
uuuggaauacguuggcgauu

SEQ ID NO: 30117 - RNA, 20 nt, Artificial Sequence
  HTT spacer sequence TTCN PAM
gcaggaacaugaauugggaa

SEQ ID NO: 30118 - RNA, 20 nt, Artificial Sequence
  HTT spacer sequence TTCN PAM
ugcagaaacuguuuggcuuu

SEQ ID NO: 30119 - RNA, 20 nt, Artificial Sequence
  HTT spacer sequence TTCN PAM
uguuccugcagaaacuguuu

SEQ ID NO: 30120 - RNA, 20 nt, Artificial Sequence
  HTT spacer sequence TTCN PAM
caauucauguuccugcagaa

SEQ ID NO: 30121 - RNA, 20 nt, Artificial Sequence
  HTT spacer sequence TTCN PAM
aauuuugcuuuguuuccuuc

SEQ ID NO: 30122 - RNA, 20 nt, Artificial Sequence
  HTT spacer sequence TTCN PAM
uucugcgagacucggguggu

SEQ ID NO: 30123 - RNA, 20 nt, Artificial Sequence
  HTT spacer sequence TTCN PAM
gcgagacucgggugguugca

SEQ ID NO: 30124 - RNA, 20 nt, Artificial Sequence
  HTT spacer sequence TTCN PAM
gaauucucuccaccaccaaa

SEQ ID NO: 30125 - RNA, 20 nt, Artificial Sequence
  HTT spacer sequence TTCN PAM
gaagugcaaccacccgaguc

SEQ ID NO: 30126 - RNA, 20 nt, Artificial Sequence
  HTT spacer sequence TTCN PAM
cuccaccaccaaaagcugcu

SEQ ID NO: 30127 - RNA, 20 nt, Artificial Sequence
  HTT spacer sequence TTCN PAM
aucgaucuuccuaacaacag

SEQ ID NO: 30128 - RNA, 20 nt, Artificial Sequence
  HTT spacer sequence TTCN PAM
uaacaacagagaucucaguu

SEQ ID NO: 30129 - RNA, 20 nt, Artificial Sequence
  HTT spacer sequence TTCN PAM
ucauaggauucaggggcuau

SEQ ID NO: 30130 - RNA, 20 nt, Artificial Sequence
  HTT spacer sequence TTCN PAM
ggggcuaucaaaaacacaaa

SEQ ID NO: 30131 - RNA, 20 nt, Artificial Sequence
  HTT spacer sequence TTCN PAM
gugagcugagauugcaccac

SEQ ID NO: 30132 - RNA, 20 nt, Artificial Sequence
  HTT spacer sequence TTCN PAM
gccuccuggguucaagagau

SEQ ID NO: 30133 - RNA, 20 nt, Artificial Sequence
  HTT spacer sequence TTCN PAM
agagauucuccugccccagc

SEQ ID NO: 30134 - RNA, 20 nt, Artificial Sequence
  HTT spacer sequence TTCN PAM
ccugccccagccugcugagu

SEQ ID NO: 30135 - RNA, 20 nt, Artificial Sequence
  HTT spacer sequence TTCN PAM
gggauaaccuuuaugaccug

SEQ ID NO: 30136 - RNA, 20 nt, Artificial Sequence
  HTT spacer sequence TTCN PAM
ucagguucugggauaaccuu

SEQ ID NO: 30137 - RNA, 20 nt, Artificial Sequence
  HTT spacer sequence TTCN PAM
caggugggcaagugcgcggg

SEQ ID NO: 30138 - RNA, 20 nt, Artificial Sequence
  HTT spacer sequence TTCN PAM
agcucuuuccuugccgcuua

SEQ ID NO: 30139 - RNA, 20 nt, Artificial Sequence
  HTT spacer sequence TTCN PAM
uugccgcuuaucaacccuuu

SEQ ID NO: 30140 - RNA, 20 nt, Artificial Sequence
  HTT spacer sequence TTCN PAM
cguuuucuuccucacucucc

SEQ ID NO: 30141 - RNA, 20 nt, Artificial Sequence
  HTT spacer sequence TTCN PAM
uccucacucuccacguugga

SEQ ID NO: 30142 - RNA, 20 nt, Artificial Sequence
  HTT spacer sequence TTCN PAM
ucacucuccacguuggauuc

SEQ ID NO: 30143 - RNA, 20 nt, Artificial Sequence
  HTT spacer sequence TTCN PAM
agguccaaguggcuaucugg

SEQ ID NO: 30144 - RNA, 20 nt, Artificial Sequence
  HTT spacer sequence TTCN PAM
ggcggggaggacacagagga

SEQ ID NO: 30145 - RNA, 20 nt, Artificial Sequence
  HTT spacer sequence TTCN PAM
uccucguugcucucaggguc

SEQ ID NO: 30146 - RNA, 20 nt, Artificial Sequence
  HTT spacer sequence TTCN PAM
ucguugcucucagggucacu

SEQ ID NO: 30147 - RNA, 20 nt, Artificial Sequence
  HTT spacer sequence TTCN PAM
uugcuuugcucuuccuggac

SEQ ID NO: 30148 - RNA, 20 nt, Artificial Sequence
  HTT spacer sequence TTCN PAM
uggacaucuuccucgacauu

SEQ ID NO: 30149 - RNA, 20 nt, Artificial Sequence
  HTT spacer sequence TTCN PAM
ucgacauucaucuuuccauc

SEQ ID NO: 30150 - RNA, 20 nt, Artificial Sequence
  HTT spacer sequence TTCN PAM
ucuuuccauccuaccaagag

SEQ ID NO: 30151 - RNA, 20 nt, Artificial Sequence
  HTT spacer sequence TTCN PAM
auccuaccaagagcguggaa

SEQ ID NO: 30152 - RNA, 20 nt, Artificial Sequence
  HTT spacer sequence TTCN PAM
acgcucuugguaggauggaa

SEQ ID NO: 30153 - RNA, 20 nt, Artificial Sequence
  HTT spacer sequence TTCN PAM
cucucuuuuuuuaauuuaaa

SEQ ID NO: 30154 - RNA, 20 nt, Artificial Sequence
  HTT spacer sequence TTCN PAM
cuuucucucucuuuuuuuaa

SEQ ID NO: 30155 - RNA, 20 nt, Artificial Sequence
  HTT spacer sequence TTCN PAM
uuuucucuuucucucucuuu

SEQ ID NO: 30156 - RNA, 20 nt, Artificial Sequence
  HTT spacer sequence TTCN PAM
uacaaaguaagauguuugcc

SEQ ID NO: 30157 - RNA, 20 nt, Artificial Sequence
  HTT spacer sequence TTCN PAM
ugcuagauaaagaugacagg

SEQ ID NO: 30158 - RNA, 20 nt, Artificial Sequence
  HTT spacer sequence TTCN PAM
gaucaucugcugacauaugu

SEQ ID NO: 30159 - RNA, 20 nt, Artificial Sequence
  HTT spacer sequence TTCN PAM
uaacauuuucauccucaucc

SEQ ID NO: 30160 - RNA, 20 nt, Artificial Sequence
  HTT spacer sequence TTCN PAM
uccucauccuuuccaagcau

SEQ ID NO: 30161 - RNA, 20 nt, Artificial Sequence
  HTT spacer sequence TTCN PAM
aagcauucuucgaagucucu

SEQ ID NO: 30162 - RNA, 20 nt, Artificial Sequence
  HTT spacer sequence TTCN PAM
ucgaagucucucagccugag

SEQ ID NO: 30163 - RNA, 20 nt, Artificial Sequence
  HTT spacer sequence TTCN PAM
aagucucucagccugagcag

SEQ ID NO: 30164 - RNA, 20 nt, Artificial Sequence
  HTT spacer sequence TTCN PAM
aagaaugcuuggaaaggaug

SEQ ID NO: 30165 - RNA, 20 nt, Artificial Sequence
  HTT spacer sequence TTCN PAM
ugcucaggcugagagacuuc

SEQ ID NO: 30166 - RNA, 20 nt, Artificial Sequence
  HTT spacer sequence TTCN PAM
uuccugcucaggcugagaga

SEQ ID NO: 30167 - RNA, 20 nt, Artificial Sequence
  HTT spacer sequence TTCN PAM
ugaggugcuccugcucuucc

SEQ ID NO: 30168 - RNA, 20 nt, Artificial Sequence
  HTT spacer sequence TTCN PAM
uuugccaauucugccuccgu

SEQ ID NO: 30169 - RNA, 20 nt, Artificial Sequence
  HTT spacer sequence TTCN PAM
gccuccgucuucauccuguu

SEQ ID NO: 30170 - RNA, 20 nt, Artificial Sequence
  HTT spacer sequence TTCN PAM
uccuguuagagggcugcgcc

SEQ ID NO: 30171 - RNA, 20 nt, Artificial Sequence
  HTT spacer sequence TTCN PAM
uuucaaagccaagcucgcga

SEQ ID NO: 30172 - RNA, 20 nt, Artificial Sequence
  HTT spacer sequence TTCN PAM
aagccaagcucgcgaaccau

SEQ ID NO: 30173 - RNA, 20 nt, Artificial Sequence
  HTT spacer sequence TTCN PAM
cgagcuuggcuuugaaauga

SEQ ID NO: 30174 - RNA, 20 nt, Artificial Sequence
  HTT spacer sequence TTCN PAM
accuuagcccgaugcauaug

SEQ ID NO: 30175 - RNA, 20 nt, Artificial Sequence
  HTT spacer sequence TTCN PAM
uucuaccuuagcccgaugca

SEQ ID NO: 30176 - RNA, 20 nt, Artificial Sequence
  HTT spacer sequence TTCN PAM
ucuuucuaccuuagcccgau

SEQ ID NO: 30177 - RNA, 20 nt, Artificial Sequence
  HTT spacer sequence TTCN PAM
ucauuuuaaaaauauauuua

SEQ ID NO: 30178 - RNA, 20 nt, Artificial Sequence
  HTT spacer sequence TTCN PAM
uuuuaaaaauauauuuauuu

SEQ ID NO: 30179 - RNA, 20 nt, Artificial Sequence
  HTT spacer sequence TTCN PAM
cucacugagcuugggugacc

SEQ ID NO: 30180 - RNA, 20 nt, Artificial Sequence
  HTT spacer sequence TTCN PAM
guacuuggcucccaccuugg

SEQ ID NO: 30181 - RNA, 20 nt, Artificial Sequence
  HTT spacer sequence TTCN PAM
uuuuugucucuguucucuga

SEQ ID NO: 30182 - RNA, 20 nt, Artificial Sequence
  HTT spacer sequence TTCN PAM
cugacuugggaguuuugugg

SEQ ID NO: 30183 - RNA, 20 nt, Artificial Sequence
  HTT spacer sequence TTCN PAM
gacucuccugucccacaaaa

SEQ ID NO: 30184 - RNA, 20 nt, Artificial Sequence
  HTT spacer sequence TTCN PAM
uuccagucuuggucuagcuu

SEQ ID NO: 30185 - RNA, 20 nt, Artificial Sequence
  HTT spacer sequence TTCN PAM
agucuuggucuagcuucucc

SEQ ID NO: 30186 - RNA, 20 nt, Artificial Sequence
  HTT spacer sequence TTCN PAM
ccgugagcucgagggcaucu

SEQ ID NO: 30187 - RNA, 20 nt, Artificial Sequence
  HTT spacer sequence TTCN PAM
cguugagcuugucucucccu

SEQ ID NO: 30188 - RNA, 20 nt, Artificial Sequence
  HTT spacer sequence TTCN PAM
ccagagggagagacaagcuc

SEQ ID NO: 30189 - RNA, 20 nt, Artificial Sequence
  HTT spacer sequence TTCN PAM
uacucacaauaaaugcuuuu

SEQ ID NO: 30190 - RNA, 20 nt, Artificial Sequence
  HTT spacer sequence TTCN PAM
guaaaagcauuuauugugag

SEQ ID NO: 30191 - RNA, 20 nt, Artificial Sequence
  HTT spacer sequence TTCN PAM
ccacgguaagacaggcucac

SEQ ID NO: 30192 - RNA, 20 nt, Artificial Sequence
  HTT spacer sequence TTCN PAM
ugaucaucuucuccacggua

SEQ ID NO: 30193 - RNA, 20 nt, Artificial Sequence
  HTT spacer sequence TTCN PAM
cuuguuuugacuuggcaaug

SEQ ID NO: 30194 - RNA, 20 nt, Artificial Sequence
  HTT spacer sequence TTCN PAM
aucagcucuuuccgggacuu

SEQ ID NO: 30195 - RNA, 20 nt, Artificial Sequence
  HTT spacer sequence TTCN PAM
gggacuucgguuucucccgc

SEQ ID NO: 30196 - RNA, 20 nt, Artificial Sequence
  HTT spacer sequence TTCN PAM
guuucucccgcuccucgccu

SEQ ID NO: 30197 - RNA, 20 nt, Artificial Sequence
  HTT spacer sequence TTCN PAM
cccgcuccucgccuuccugu

SEQ ID NO: 30198 - RNA, 20 nt, Artificial Sequence
  HTT spacer sequence TTCN PAM
uguugagucuucuugugaag

SEQ ID NO: 30199 - RNA, 20 nt, Artificial Sequence
  HTT spacer sequence TTCN PAM
ugugaaggagcccaccgccu

SEQ ID NO: 30200 - RNA, 20 nt, Artificial Sequence
  HTT spacer sequence TTCN PAM
caagaagacucaacaggaag

SEQ ID NO: 30201 - RNA, 20 nt, Artificial Sequence
  HTT spacer sequence TTCN PAM
gccuuuugcccccagcugag

SEQ ID NO: 30202 - RNA, 20 nt, Artificial Sequence
  HTT spacer sequence TTCN PAM
cugugggguuuucugccuuu

SEQ ID NO: 30203 - RNA, 20 nt, Artificial Sequence
  HTT spacer sequence TTCN PAM
gaagaugcuggaaaugggac

SEQ ID NO: 30204 - RNA, 20 nt, Artificial Sequence
  HTT spacer sequence TTCN PAM
gaacaaagguguacaaaucu

SEQ ID NO: 30205 - RNA, 20 nt, Artificial Sequence
  HTT spacer sequence TTCN PAM
agcaucuucagaacaaaggu

SEQ ID NO: 30206 - RNA, 20 nt, Artificial Sequence
  HTT spacer sequence TTCN PAM
cugagcucauggguagaacg

SEQ ID NO: 30207 - RNA, 20 nt, Artificial Sequence
  HTT spacer sequence TTCN PAM
acccaugagcucagagaaau

SEQ ID NO: 30208 - RNA, 20 nt, Artificial Sequence
  HTT spacer sequence TTCN PAM
aauaaaauaauggauaucaa

SEQ ID NO: 30209 - RNA, 20 nt, Artificial Sequence
  HTT spacer sequence TTCN PAM
ucgauccucagcaucgcugu

SEQ ID NO: 30210 - RNA, 20 nt, Artificial Sequence
  HTT spacer sequence TTCN PAM
cgaugucugccaaagacugg

SEQ ID NO: 30211 - RNA, 20 nt, Artificial Sequence
  HTT spacer sequence TTCN PAM
ucaucuucauuuagauugua

SEQ ID NO: 30212 - RNA, 20 nt, Artificial Sequence
  HTT spacer sequence TTCN PAM
ucuucauuuagauuguagau

SEQ ID NO: 30213 - RNA, 20 nt, Artificial Sequence
  HTT spacer sequence TTCN PAM
uuuagauuguagaugcuuuu

SEQ ID NO: 30214 - RNA, 20 nt, Artificial Sequence
  HTT spacer sequence TTCN PAM
caugaugucgcugacagaag

SEQ ID NO: 30215 - RNA, 20 nt, Artificial Sequence
  HTT spacer sequence TTCN PAM
gucagcgacaucaugagaaa

SEQ ID NO: 30216 - RNA, 20 nt, Artificial Sequence
  HTT spacer sequence TTCN PAM
cuucugucagcgacaucaug

SEQ ID NO: 30217 - RNA, 20 nt, Artificial Sequence
  HTT spacer sequence TTCN PAM
uaaaauuaccacuuccauuu

SEQ ID NO: 30218 - RNA, 20 nt, Artificial Sequence
  HTT spacer sequence TTCN PAM
uuccauaccugcuguuccag

SEQ ID NO: 30219 - RNA, 20 nt, Artificial Sequence
  HTT spacer sequence TTCN PAM
auaccugcuguuccagagca

SEQ ID NO: 30220 - RNA, 20 nt, Artificial Sequence
  HTT spacer sequence TTCN PAM
agagcaaaccucuucaucau

SEQ ID NO: 30221 - RNA, 20 nt, Artificial Sequence
  HTT spacer sequence TTCN PAM
ucaucuucuccucggggcuc

SEQ ID NO: 30222 - RNA, 20 nt, Artificial Sequence
  HTT spacer sequence TTCN PAM
ccucggggcucauguugcug

SEQ ID NO: 30223 - RNA, 20 nt, Artificial Sequence
  HTT spacer sequence TTCN PAM
ccgaagcguuuaucucugaa

SEQ ID NO: 30224 - RNA, 20 nt, Artificial Sequence
  HTT spacer sequence TTCN PAM
gagaauacaacagcaacaug

SEQ ID NO: 30225 - RNA, 20 nt, Artificial Sequence
  HTT spacer sequence TTCN PAM
gagauaaacgcuucggagaa

SEQ ID NO: 30226 - RNA, 20 nt, Artificial Sequence
  HTT spacer sequence TTCN PAM
uuguacucuuuuaguaaagu

SEQ ID NO: 30227 - RNA, 20 nt, Artificial Sequence
  HTT spacer sequence TTCN PAM
agcguacacagacuuuacua

SEQ ID NO: 30228 - RNA, 20 nt, Artificial Sequence
  HTT spacer sequence TTCN PAM
gaccuguuuuccagcguaca

SEQ ID NO: 30229 - RNA, 20 nt, Artificial Sequence
  HTT spacer sequence TTCN PAM
ugugauuuccacuacagggg

SEQ ID NO: 30230 - RNA, 20 nt, Artificial Sequence
  HTT spacer sequence TTCN PAM
aaguuggcuguccuggaggu

SEQ ID NO: 30231 - RNA, 20 nt, Artificial Sequence
  HTT spacer sequence TTCN PAM
accuccaggacagccaacuu

SEQ ID NO: 30232 - RNA, 20 nt, Artificial Sequence
  HTT spacer sequence TTCN PAM
cuaaagaaagcugugagagg

SEQ ID NO: 30233 - RNA, 20 nt, Artificial Sequence
  HTT spacer sequence TTCN PAM
uuagggaauucaaccuccag

SEQ ID NO: 30234 - RNA, 20 nt, Artificial Sequence
  HTT spacer sequence TTCN PAM
ucacccaucucuguccucuc

SEQ ID NO: 30235 - RNA, 20 nt, Artificial Sequence
  HTT spacer sequence TTCN PAM
ucgagcaguacaggcuagca

SEQ ID NO: 30236 - RNA, 20 nt, Artificial Sequence
  HTT spacer sequence TTCN PAM
agcaggaaggggguagaugg

SEQ ID NO: 30237 - RNA, 20 nt, Artificial Sequence
  HTT spacer sequence TTCN PAM
ugcuagaagccagugacacu

SEQ ID NO: 30238 - RNA, 20 nt, Artificial Sequence
  HTT spacer sequence TTCN PAM
cauuaucuggaauaugauuc

SEQ ID NO: 30239 - RNA, 20 nt, Artificial Sequence
  HTT spacer sequence TTCN PAM
agauaaugagaacuaauauu

SEQ ID NO: 30240 - RNA, 20 nt, Artificial Sequence
  HTT spacer sequence TTCN PAM
acauuauugugauucucuuu

SEQ ID NO: 30241 - RNA, 20 nt, Artificial Sequence
  HTT spacer sequence TTCN PAM
cuuucuuucuuaaacuauau

SEQ ID NO: 30242 - RNA, 20 nt, Artificial Sequence
  HTT spacer sequence TTCN PAM
uucuuaaacuauauagaugu

SEQ ID NO: 30243 - RNA, 20 nt, Artificial Sequence
  HTT spacer sequence TTCN PAM
uaaacuauauagauguugug

SEQ ID NO: 30244 - RNA, 20 nt, Artificial Sequence
  HTT spacer sequence TTCN PAM
auaugaugucacaacaucua

SEQ ID NO: 30245 - RNA, 20 nt, Artificial Sequence
  HTT spacer sequence TTCN PAM
uaaaucaguaacuauauuaa

SEQ ID NO: 30246 - RNA, 20 nt, Artificial Sequence
  HTT spacer sequence TTCN PAM
ggcuccccgugcgccccccg

SEQ ID NO: 30247 - RNA, 20 nt, Artificial Sequence
  HTT spacer sequence TTCN PAM
ugagggcccgugcgcgagac

SEQ ID NO: 30248 - RNA, 20 nt, Artificial Sequence
  HTT spacer sequence TTCN PAM
ggcccaggaucuggaacuuc

SEQ ID NO: 30249 - RNA, 20 nt, Artificial Sequence
  HTT spacer sequence TTCN PAM
agauccugggccggaagacg

SEQ ID NO: 30250 - RNA, 20 nt, Artificial Sequence
  HTT spacer sequence TTCN PAM
gccuguuaacuuucaccucg

SEQ ID NO: 30251 - RNA, 20 nt, Artificial Sequence
  HTT spacer sequence TTCN PAM
ccucgaacggauuggaguug

SEQ ID NO: 30252 - RNA, 20 nt, Artificial Sequence
  HTT spacer sequence TTCN PAM
aggugaaaguuaacaggcag

SEQ ID NO: 30253 - RNA, 20 nt, Artificial Sequence
  HTT spacer sequence TTCN PAM
ccgggcccccucgcgcuccc

SEQ ID NO: 30254 - RNA, 20 nt, Artificial Sequence
  HTT spacer sequence TTCN PAM
uucgcgccccgaccuucuuc

SEQ ID NO: 30255 - RNA, 20 nt, Artificial Sequence
  HTT spacer sequence TTCN PAM
cgccccgaccuucuucgccu

SEQ ID NO: 30256 - RNA, 20 nt, Artificial Sequence
  HTT spacer sequence TTCN PAM
ucgccuucgccauggcgcgc

SEQ ID NO: 30257 - RNA, 20 nt, Artificial Sequence
  HTT spacer sequence TTCN PAM
ccuucgccauggcgcgcgcc

SEQ ID NO: 30258 - RNA, 20 nt, Artificial Sequence
  HTT spacer sequence TTCN PAM
ccauggcgcgcgccccgcug

SEQ ID NO: 30259 - RNA, 20 nt, Artificial Sequence
  HTT spacer sequence TTCN PAM
gcggcccggcacgugucuua

SEQ ID NO: 30260 - RNA, 20 nt, Artificial Sequence
  HTT spacer sequence TTCN PAM
ucgucucgcgagaacagcgc

SEQ ID NO: 30261 - RNA, 20 nt, Artificial Sequence
  HTT spacer sequence TTCN PAM
cgcgagacgaggaagcgguu

SEQ ID NO: 30262 - RNA, 20 nt, Artificial Sequence
  HTT spacer sequence TTCN PAM
cgcgagucggaggugcugcg

SEQ ID NO: 30263 - RNA, 20 nt, Artificial Sequence
  HTT spacer sequence TTCN PAM
gggagcuguagugccccggc

SEQ ID NO: 30264 - RNA, 20 nt, Artificial Sequence
  HTT spacer sequence TTCN PAM
gcuaagccguuagcgccgag

SEQ ID NO: 30265 - RNA, 20 nt, Artificial Sequence
  HTT spacer sequence TTCN PAM
uggccccaucgcccucgccu

SEQ ID NO: 30266 - RNA, 20 nt, Artificial Sequence
  HTT spacer sequence TTCN PAM
ucuuggccccaucgcccucg

SEQ ID NO: 30267 - RNA, 20 nt, Artificial Sequence
  HTT spacer sequence TTCN PAM
gcgagaccgaggagacugag

SEQ ID NO: 30268 - RNA, 20 nt, Artificial Sequence
  HTT spacer sequence TTCN PAM
cgagcuccauguccuggcgc

SEQ ID NO: 30269 - RNA, 20 nt, Artificial Sequence
  HTT spacer sequence TTCN PAM
gcagcagcgaguuggccacg

SEQ ID NO: 30270 - RNA, 20 nt, Artificial Sequence
  HTT spacer sequence TTCN PAM
cuaaccauuaaucaagcuau

SEQ ID NO: 30271 - RNA, 20 nt, Artificial Sequence
  HTT spacer sequence TTCN PAM
acuucucuaaccauuaauca

SEQ ID NO: 30272 - RNA, 20 nt, Artificial Sequence
  HTT spacer sequence TTCN PAM
agacuagccugggcaacaua

SEQ ID NO: 30273 - RNA, 20 nt, Artificial Sequence
  HTT spacer sequence TTCN PAM
gccucccaaagugcugggau

SEQ ID NO: 30274 - RNA, 20 nt, Artificial Sequence
  HTT spacer sequence TTCN PAM
aauaucugacagauaagaaa

SEQ ID NO: 30275 - RNA, 20 nt, Artificial Sequence
  HTT spacer sequence TTCN PAM
cugccaacaaaagguuaccc

SEQ ID NO: 30276 - RNA, 20 nt, Artificial Sequence
  HTT spacer sequence TTCN PAM
cuaagcaauaaugucuaccg

SEQ ID NO: 30277 - RNA, 20 nt, Artificial Sequence
  HTT spacer sequence TTCN PAM
uuuggccaggcgcgguggcu

SEQ ID NO: 30278 - RNA, 20 nt, Artificial Sequence
  HTT spacer sequence TTCN PAM
ugagcuuuauauuuugaccc

SEQ ID NO: 30279 - RNA, 20 nt, Artificial Sequence
  HTT spacer sequence TTCN PAM
uuaagguaacuauugccuaa

SEQ ID NO: 30280 - RNA, 20 nt, Artificial Sequence
  HTT spacer sequence TTCN PAM
agaguuuuuugaggagcuuu

SEQ ID NO: 30281 - RNA, 20 nt, Artificial Sequence
  HTT spacer sequence TTCN PAM
uaaguuacuuuuuagcagaa

SEQ ID NO: 30282 - RNA, 20 nt, Artificial Sequence
  HTT spacer sequence TTCN PAM
gcuaaaaaguaacuuaagaa

SEQ ID NO: 30283 - RNA, 20 nt, Artificial Sequence
  HTT spacer sequence TTCN PAM
gucuccaguaaauauguggu

SEQ ID NO: 30284 - RNA, 20 nt, Artificial Sequence
  HTT spacer sequence TTCN PAM
aaaguacaaauuaauagucu

SEQ ID NO: 30285 - RNA, 20 nt, Artificial Sequence
  HTT spacer sequence TTCN PAM
ucaugcuuguuucagcaccu

SEQ ID NO: 30286 - RNA, 20 nt, Artificial Sequence
  HTT spacer sequence TTCN PAM
ugcuuguuucagcaccuuuu

SEQ ID NO: 30287 - RNA, 20 nt, Artificial Sequence
  HTT spacer sequence TTCN PAM
ucauccuuauucauucauuc

SEQ ID NO: 30288 - RNA, 20 nt, Artificial Sequence
  HTT spacer sequence TTCN PAM
uuuccucauccuuauucauu

SEQ ID NO: 30289 - RNA, 20 nt, Artificial Sequence
  HTT spacer sequence TTCN PAM
gauccaggcauaccuaccgu

SEQ ID NO: 30290 - RNA, 20 nt, Artificial Sequence
  HTT spacer sequence TTCN PAM
gcuucagauccaggcauacc

SEQ ID NO: 30291 - RNA, 20 nt, Artificial Sequence
  HTT spacer sequence TTCN PAM
auuuuugggccacuucugcu

SEQ ID NO: 30292 - RNA, 20 nt, Artificial Sequence
  HTT spacer sequence TTCN PAM
uuccauuuuugggccacuuc

SEQ ID NO: 30293 - RNA, 20 nt, Artificial Sequence
  HTT spacer sequence TTCN PAM
uuuccuuccauuuuugggcc

SEQ ID NO: 30294 - RNA, 20 nt, Artificial Sequence
  HTT spacer sequence TTCN PAM
ugccaaguuucuuuuccuuc

SEQ ID NO: 30295 - RNA, 20 nt, Artificial Sequence
  HTT spacer sequence TTCN PAM
ugcuauuccugccaaguuuc

SEQ ID NO: 30296 - RNA, 20 nt, Artificial Sequence
  HTT spacer sequence TTCN PAM
uccugcuauuccugccaagu

SEQ ID NO: 30297 - RNA, 20 nt, Artificial Sequence
  HTT spacer sequence TTCN PAM
ucuuccugcuauuccugcca

SEQ ID NO: 30298 - RNA, 20 nt, Artificial Sequence
  HTT spacer sequence TTCN PAM
auuuuuauaaggauaccaau

SEQ ID NO: 30299 - RNA, 20 nt, Artificial Sequence
  HTT spacer sequence TTCN PAM
ccaguuagccccuaacccuc

SEQ ID NO: 30300 - RNA, 20 nt, Artificial Sequence
  HTT spacer sequence TTCN PAM
uucauucauucaacaaauau

SEQ ID NO: 30301 - RNA, 20 nt, Artificial Sequence
  HTT spacer sequence TTCN PAM
uacauucauucauucauuca

SEQ ID NO: 30302 - RNA, 20 nt, Artificial Sequence
  HTT spacer sequence TTCN PAM
guuucacucaaaaacgguuu

SEQ ID NO: 30303 - RNA, 20 nt, Artificial Sequence
  HTT spacer sequence TTCN PAM
cucaaaaacgguuuauugug

SEQ ID NO: 30304 - RNA, 20 nt, Artificial Sequence
  HTT spacer sequence TTCN PAM
ucccuguaucccuagagcca

SEQ ID NO: 30305 - RNA, 20 nt, Artificial Sequence
  HTT spacer sequence TTCN PAM
ucuguuuuuauucaucccug

SEQ ID NO: 30306 - RNA, 20 nt, Artificial Sequence
  HTT spacer sequence TTCN PAM
gagaagcugacagucaugga

SEQ ID NO: 30307 - RNA, 20 nt, Artificial Sequence
  HTT spacer sequence TTCN PAM
cagaaggagauauucaucug

SEQ ID NO: 30308 - RNA, 20 nt, Artificial Sequence
  HTT spacer sequence TTCN PAM
cugugucugcuugcuucagc

SEQ ID NO: 30309 - RNA, 20 nt, Artificial Sequence
  HTT spacer sequence TTCN PAM
gcccuuuucugccuauaaaa

SEQ ID NO: 30310 - RNA, 20 nt, Artificial Sequence
  HTT spacer sequence TTCN PAM
gccuauaaaaccaaacuccu

SEQ ID NO: 30311 - RNA, 20 nt, Artificial Sequence
  HTT spacer sequence TTCN PAM
augagcuaaacagaggaguu

SEQ ID NO: 30312 - RNA, 20 nt, Artificial Sequence
  HTT spacer sequence TTCN PAM
uucucuuucucucuuucuuu

SEQ ID NO: 30313 - RNA, 20 nt, Artificial Sequence
  HTT spacer sequence TTCN PAM
cuuucucucuuucuuucucu

SEQ ID NO: 30314 - RNA, 20 nt, Artificial Sequence
  HTT spacer sequence TTCN PAM
cucuuucuuucucucucuuu

SEQ ID NO: 30315 - RNA, 20 nt, Artificial Sequence
  HTT spacer sequence TTCN PAM
uucucucucuuucccucccu

SEQ ID NO: 30316 - RNA, 20 nt, Artificial Sequence
  HTT spacer sequence TTCN PAM
cucucuuucccucccuccuc

SEQ ID NO: 30317 - RNA, 20 nt, Artificial Sequence
  HTT spacer sequence TTCN PAM
uuuuuacagcuaaaauugag

SEQ ID NO: 30318 - RNA, 20 nt, Artificial Sequence
  HTT spacer sequence TTCN PAM
caauuuuagcuguaaaaaag

SEQ ID NO: 30319 - RNA, 20 nt, Artificial Sequence
  HTT spacer sequence TTCN PAM
auaaaaccuaguuuauucuc

SEQ ID NO: 30320 - RNA, 20 nt, Artificial Sequence
  HTT spacer sequence TTCN PAM
uaaaagucaguugcuguauu

SEQ ID NO: 30321 - RNA, 20 nt, Artificial Sequence
  HTT spacer sequence TTCN PAM
cacucaauauggaucuuuag

SEQ ID NO: 30322 - RNA, 20 nt, Artificial Sequence
  HTT spacer sequence TTCN PAM
ucccacucaauauggaucuu

SEQ ID NO: 30323 - RNA, 20 nt, Artificial Sequence
  HTT spacer sequence TTCN PAM
cuuuuucuucccacucaaua

SEQ ID NO: 30324 - RNA, 20 nt, Artificial Sequence
  HTT spacer sequence TTCN PAM
ucuuuaaaauuacuuuaugu

SEQ ID NO: 30325 - RNA, 20 nt, Artificial Sequence
  HTT spacer sequence TTCN PAM
ggugcaccuguggcucgcca

SEQ ID NO: 30326 - RNA, 20 nt, Artificial Sequence
  HTT spacer sequence TTCN PAM
ccuuuucgggugcaccugug

SEQ ID NO: 30327 - RNA, 20 nt, Artificial Sequence
  HTT spacer sequence TTCN PAM
uuuccccuuuucgggugcac

SEQ ID NO: 30328 - RNA, 20 nt, Artificial Sequence
  HTT spacer sequence TTCN PAM
ucuuccuuuccccuuuucgg

SEQ ID NO: 30329 - RNA, 20 nt, Artificial Sequence
  HTT spacer sequence TTCN PAM
cauaagcugcuuggaaacag

SEQ ID NO: 30330 - RNA, 20 nt, Artificial Sequence
  HTT spacer sequence TTCN PAM
aagcagcuuaugugaaccuc

SEQ ID NO: 30331 - RNA, 20 nt, Artificial Sequence
  HTT spacer sequence TTCN PAM
uggacucaagagauccagcu

SEQ ID NO: 30332 - RNA, 20 nt, Artificial Sequence
  HTT spacer sequence TTCN PAM
gcauucuagccugggugaca

SEQ ID NO: 30333 - RNA, 20 nt, Artificial Sequence
  HTT spacer sequence TTCN PAM
agccugggugacagagcaag

SEQ ID NO: 30334 - RNA, 20 nt, Artificial Sequence
  HTT spacer sequence TTCN PAM
uuuuugagauagggucuugc

SEQ ID NO: 30335 - RNA, 20 nt, Artificial Sequence
  HTT spacer sequence TTCN PAM
gggguauuugcacauugaga

SEQ ID NO: 30336 - RNA, 20 nt, Artificial Sequence
  HTT spacer sequence TTCN PAM
acccacuuggccuggcaggc

SEQ ID NO: 30337 - RNA, 20 nt, Artificial Sequence
  HTT spacer sequence TTCN PAM
cuacugguccagaucccaug

SEQ ID NO: 30338 - RNA, 20 nt, Artificial Sequence
  HTT spacer sequence TTCN PAM
uccuggacaugggacaagaa

SEQ ID NO: 30339 - RNA, 20 nt, Artificial Sequence
  HTT spacer sequence TTCN PAM
ugcuuacccuccaguugucu

SEQ ID NO: 30340 - RNA, 20 nt, Artificial Sequence
  HTT spacer sequence TTCN PAM
gcaggcagaucaucccaucg

SEQ ID NO: 30341 - RNA, 20 nt, Artificial Sequence
  HTT spacer sequence TTCN PAM
gcagacuggagugagaacuu

SEQ ID NO: 30342 - RNA, 20 nt, Artificial Sequence
  HTT spacer sequence TTCN PAM
gucuaucccuggcuugaagg

SEQ ID NO: 30343 - RNA, 20 nt, Artificial Sequence
  HTT spacer sequence TTCN PAM
agccagggauagacugaagc

SEQ ID NO: 30344 - RNA, 20 nt, Artificial Sequence
  HTT spacer sequence TTCN PAM
cuggggacccugccccuuuc

SEQ ID NO: 30345 - RNA, 20 nt, Artificial Sequence
  HTT spacer sequence TTCN PAM
acccaggagccugucugccu

SEQ ID NO: 30346 - RNA, 20 nt, Artificial Sequence
  HTT spacer sequence TTCN PAM
gcucagugcaggccagggca

SEQ ID NO: 30347 - RNA, 20 nt, Artificial Sequence
  HTT spacer sequence TTCN PAM
cuaucucugcuuucucuugu

SEQ ID NO: 30348 - RNA, 20 nt, Artificial Sequence
  HTT spacer sequence TTCN PAM
uauuucacuaucucugcuuu

SEQ ID NO: 30349 - RNA, 20 nt, Artificial Sequence
  HTT spacer sequence TTCN PAM
cugcucaaugauucagcagc

SEQ ID NO: 30350 - RNA, 20 nt, Artificial Sequence
  HTT spacer sequence TTCN PAM
gcagcuugggcacagaagca

SEQ ID NO: 30351 - RNA, 20 nt, Artificial Sequence
  HTT spacer sequence TTCN PAM
gugcccaagcugcugaauca

SEQ ID NO: 30352 - RNA, 20 nt, Artificial Sequence
  HTT spacer sequence TTCN PAM
guggugcuucugugcccaag

SEQ ID NO: 30353 - RNA, 20 nt, Artificial Sequence
  HTT spacer sequence TTCN PAM
acuuguggaaucuagagggc

SEQ ID NO: 30354 - RNA, 20 nt, Artificial Sequence
  HTT spacer sequence TTCN PAM
acaaguggaaaacaagcaug

SEQ ID NO: 30355 - RNA, 20 nt, Artificial Sequence
  HTT spacer sequence TTCN PAM
cccuagacucauaaucuucc

SEQ ID NO: 30356 - RNA, 20 nt, Artificial Sequence
  HTT spacer sequence TTCN PAM
acauguucacccuagacuca

SEQ ID NO: 30357 - RNA, 20 nt, Artificial Sequence
  HTT spacer sequence TTCN PAM
gggcugcuuauaaguauuua

SEQ ID NO: 30358 - RNA, 20 nt, Artificial Sequence
  HTT spacer sequence TTCN PAM
aaaucuguaaacaagaucua

SEQ ID NO: 30359 - RNA, 20 nt, Artificial Sequence
  HTT spacer sequence TTCN PAM
aaauggcagagcuagugaca

SEQ ID NO: 30360 - RNA, 20 nt, Artificial Sequence
  HTT spacer sequence TTCN PAM
ugauagguacccaaaccacu

SEQ ID NO: 30361 - RNA, 20 nt, Artificial Sequence
  HTT spacer sequence TTCN PAM
guuugagugguuuggguacc

SEQ ID NO: 30362 - RNA, 20 nt, Artificial Sequence
  HTT spacer sequence TTCN PAM
accaauauaucuuaacauuu

SEQ ID NO: 30363 - RNA, 20 nt, Artificial Sequence
  HTT spacer sequence TTCN PAM
uuuaacagucagaaauaucc

SEQ ID NO: 30364 - RNA, 20 nt, Artificial Sequence
  HTT spacer sequence TTCN PAM
cccaaauucaggaggauaug

SEQ ID NO: 30365 - RNA, 20 nt, Artificial Sequence
  HTT spacer sequence TTCN PAM
ggaggauauggcaaaaaaag

SEQ ID NO: 30366 - RNA, 20 nt, Artificial Sequence
  HTT spacer sequence TTCN PAM
auuuuuuacuacgaccacuu

SEQ ID NO: 30367 - RNA, 20 nt, Artificial Sequence
  HTT spacer sequence TTCN PAM
auuggugaguaaauagugcc

SEQ ID NO: 30368 - RNA, 20 nt, Artificial Sequence
  HTT spacer sequence TTCN PAM
ugauuccucucaggaaaaaa

SEQ ID NO: 30369 - RNA, 20 nt, Artificial Sequence
  HTT spacer sequence TTCN PAM
ucucaggaaaaaaaauccuu

SEQ ID NO: 30370 - RNA, 20 nt, Artificial Sequence
  HTT spacer sequence TTCN PAM
ugagaggaaucaugaagaua

SEQ ID NO: 30371 - RNA, 20 nt, Artificial Sequence
  HTT spacer sequence TTCN PAM
gaucugcaguuauaaaguug

SEQ ID NO: 30372 - RNA, 20 nt, Artificial Sequence
  HTT spacer sequence TTCN PAM
uuaaaaauauauauuuuuua

SEQ ID NO: 30373 - RNA, 20 nt, Artificial Sequence
  HTT spacer sequence TTCN PAM
acagacaauaauuggcucgg

SEQ ID NO: 30374 - RNA, 20 nt, Artificial Sequence
  HTT spacer sequence TTCN PAM
ucuacagacaauaauuggcu

SEQ ID NO: 30375 - RNA, 20 nt, Artificial Sequence
  HTT spacer sequence TTCN PAM
agacaguuuucuaugcacgu

SEQ ID NO: 30376 - RNA, 20 nt, Artificial Sequence
  HTT spacer sequence TTCN PAM
augcacguuuuaaaaaauua

SEQ ID NO: 30377 - RNA, 20 nt, Artificial Sequence
  HTT spacer sequence TTCN PAM
uuuaguacuauuguaguucc

SEQ ID NO: 30378 - RNA, 20 nt, Artificial Sequence
  HTT spacer sequence TTCN PAM
uuuuaaagaaagaugaugaa

SEQ ID NO: 30379 - RNA, 20 nt, Artificial Sequence
  HTT spacer sequence TTCN PAM
uuaaaaggaacuacaauagu

SEQ ID NO: 30380 - RNA, 20 nt, Artificial Sequence
  HTT spacer sequence TTCN PAM
ucaucuuucuuuaaaaggaa

SEQ ID NO: 30381 - RNA, 20 nt, Artificial Sequence
  HTT spacer sequence TTCN PAM
ggugguauaaaggagcuagu

SEQ ID NO: 30382 - RNA, 20 nt, Artificial Sequence
  HTT spacer sequence TTCN PAM
cuaaaaguuuacaaaugacc

SEQ ID NO: 30383 - RNA, 20 nt, Artificial Sequence
  HTT spacer sequence TTCN PAM
aaucuuuuauccguuuuaaa

SEQ ID NO: 30384 - RNA, 20 nt, Artificial Sequence
  HTT spacer sequence TTCN PAM
uucuauguucuagauauuag

SEQ ID NO: 30385 - RNA, 20 nt, Artificial Sequence
  HTT spacer sequence TTCN PAM
auguucuagauauuagaugc

SEQ ID NO: 30386 - RNA, 20 nt, Artificial Sequence
  HTT spacer sequence TTCN PAM
agauauuagaugcuuaacag

SEQ ID NO: 30387 - RNA, 20 nt, Artificial Sequence
  HTT spacer sequence TTCN PAM
ccugcuuaucuguuaagcau

SEQ ID NO: 30388 - RNA, 20 nt, Artificial Sequence
  HTT spacer sequence TTCN PAM
ggcgauucuccugcuuaucu

SEQ ID NO: 30389 - RNA, 20 nt, Artificial Sequence
  HTT spacer sequence TTCN PAM
cacucgauacaguaaaaguc

SEQ ID NO: 30390 - RNA, 20 nt, Artificial Sequence
  HTT spacer sequence TTCN PAM
aagccuuacaguucucacuc

SEQ ID NO: 30391 - RNA, 20 nt, Artificial Sequence
  HTT spacer sequence TTCN PAM
auuuguuugcuucuuauccc

SEQ ID NO: 30392 - RNA, 20 nt, Artificial Sequence
  HTT spacer sequence TTCN PAM
uaucccuuugcuucacccag

SEQ ID NO: 30393 - RNA, 20 nt, Artificial Sequence
  HTT spacer sequence TTCN PAM
cccagaaaaggauuauagca

SEQ ID NO: 30394 - RNA, 20 nt, Artificial Sequence
  HTT spacer sequence TTCN PAM
gggugaagcaaagggauaag

SEQ ID NO: 30395 - RNA, 20 nt, Artificial Sequence
  HTT spacer sequence TTCN PAM
uaucgguugcuugucacaaa

SEQ ID NO: 30396 - RNA, 20 nt, Artificial Sequence
  HTT spacer sequence TTCN PAM
ggcaguucugugauaccaaa

SEQ ID NO: 30397 - RNA, 20 nt, Artificial Sequence
  HTT spacer sequence TTCN PAM
gugauaccaaacccacucua

SEQ ID NO: 30398 - RNA, 20 nt, Artificial Sequence
  HTT spacer sequence TTCN PAM
augugccucuuuagaguggg

SEQ ID NO: 30399 - RNA, 20 nt, Artificial Sequence
  HTT spacer sequence TTCN PAM
uggaugcaguggugagcagu

SEQ ID NO: 30400 - RNA, 20 nt, Artificial Sequence
  HTT spacer sequence TTCN PAM
aaagcauaagauuggguggu

SEQ ID NO: 30401 - RNA, 20 nt, Artificial Sequence
  HTT spacer sequence TTCN PAM
aaaaugcugggauuacagca

SEQ ID NO: 30402 - RNA, 20 nt, Artificial Sequence
  HTT spacer sequence TTCN PAM
cuguguuggucaggaugguc

SEQ ID NO: 30403 - RNA, 20 nt, Artificial Sequence
  HTT spacer sequence TTCN PAM
ccugccucagccucccaagu

SEQ ID NO: 30404 - RNA, 20 nt, Artificial Sequence
  HTT spacer sequence TTCN PAM
agugauuccccugccucagc

SEQ ID NO: 30405 - RNA, 20 nt, Artificial Sequence
  HTT spacer sequence TTCN PAM
ugcucauuaaaugaauuagu

SEQ ID NO: 30406 - RNA, 20 nt, Artificial Sequence
  HTT spacer sequence TTCN PAM
uuuaaugagcaagaaauagg

SEQ ID NO: 30407 - RNA, 20 nt, Artificial Sequence
  HTT spacer sequence TTCN PAM
accagagaacuagaacccau

SEQ ID NO: 30408 - RNA, 20 nt, Artificial Sequence
  HTT spacer sequence TTCN PAM
cugguugaauccugacugau

SEQ ID NO: 30409 - RNA, 20 nt, Artificial Sequence
  HTT spacer sequence TTCN PAM
gccugaggacggcagcuuca

SEQ ID NO: 30410 - RNA, 20 nt, Artificial Sequence
  HTT spacer sequence TTCN PAM
uccuccaggaagacucaucu

SEQ ID NO: 30411 - RNA, 20 nt, Artificial Sequence
  HTT spacer sequence TTCN PAM
uccaggaagacucaucucug

SEQ ID NO: 30412 - RNA, 20 nt, Artificial Sequence
  HTT spacer sequence TTCN PAM
uggaggaagaaauucugccu

SEQ ID NO: 30413 - RNA, 20 nt, Artificial Sequence
  HTT spacer sequence TTCN PAM
uaacaccuuccaacugauua

SEQ ID NO: 30414 - RNA, 20 nt, Artificial Sequence
  HTT spacer sequence TTCN PAM
aacugauuaggucagagcca

SEQ ID NO: 30415 - RNA, 20 nt, Artificial Sequence
  HTT spacer sequence TTCN PAM
ccaacaauguuucauuaugu

SEQ ID NO: 30416 - RNA, 20 nt, Artificial Sequence
  HTT spacer sequence TTCN PAM
ucaccaacaauguuucauua

SEQ ID NO: 30417 - RNA, 20 nt, Artificial Sequence
  HTT spacer sequence TTCN PAM
aggccagccugagcaacaua

SEQ ID NO: 30418 - RNA, 20 nt, Artificial Sequence
  HTT spacer sequence TTCN PAM
uucuuuucuuccaucucucc

SEQ ID NO: 30419 - RNA, 20 nt, Artificial Sequence
  HTT spacer sequence TTCN PAM
uuucuuccaucucuccaauc

SEQ ID NO: 30420 - RNA, 20 nt, Artificial Sequence
  HTT spacer sequence TTCN PAM
uccaucucuccaaucaggca

SEQ ID NO: 30421 - RNA, 20 nt, Artificial Sequence
  HTT spacer sequence TTCN PAM
aucucuccaaucaggcagaa

SEQ ID NO: 30422 - RNA, 20 nt, Artificial Sequence
  HTT spacer sequence TTCN PAM
gccugauuggagagauggaa

SEQ ID NO: 30423 - RNA, 20 nt, Artificial Sequence
  HTT spacer sequence TTCN PAM
uauucugccugauuggagag

SEQ ID NO: 30424 - RNA, 20 nt, Artificial Sequence
  HTT spacer sequence TTCN PAM
guccucaucaucggcaacuu

SEQ ID NO: 30425 - RNA, 20 nt, Artificial Sequence
  HTT spacer sequence TTCN PAM
ucaaugauaagguguguuuu

SEQ ID NO: 30426 - RNA, 20 nt, Artificial Sequence
  HTT spacer sequence TTCN PAM
augauaagguguguuuucuu

SEQ ID NO: 30427 - RNA, 20 nt, Artificial Sequence
  HTT spacer sequence TTCN PAM
ucuuuagaauaaaaauuugu

SEQ ID NO: 30428 - RNA, 20 nt, Artificial Sequence
  HTT spacer sequence TTCN PAM
uuagaauaaaaauuuguaga

SEQ ID NO: 30429 - RNA, 20 nt, Artificial Sequence
  HTT spacer sequence TTCN PAM
aaagaagaaaacacaccuua

SEQ ID NO: 30430 - RNA, 20 nt, Artificial Sequence
  HTT spacer sequence TTCN PAM
ggaggcugaggaaggaggau

SEQ ID NO: 30431 - RNA, 20 nt, Artificial Sequence
  HTT spacer sequence TTCN PAM
ucagccucccgaagugcugg

SEQ ID NO: 30432 - RNA, 20 nt, Artificial Sequence
  HTT spacer sequence TTCN PAM
agaucagcauggccaacaua

SEQ ID NO: 30433 - RNA, 20 nt, Artificial Sequence
  HTT spacer sequence TTCN PAM
ucuuuugcauuuuguuugau

SEQ ID NO: 30434 - RNA, 20 nt, Artificial Sequence
  HTT spacer sequence TTCN PAM
ucaugacaucaaacaaaaug

SEQ ID NO: 30435 - RNA, 20 nt, Artificial Sequence
  HTT spacer sequence TTCN PAM
aagagaucuaauuguuaguu

SEQ ID NO: 30436 - RNA, 20 nt, Artificial Sequence
  HTT spacer sequence TTCN PAM
guguauuuaaaguuucagaa

SEQ ID NO: 30437 - RNA, 20 nt, Artificial Sequence
  HTT spacer sequence TTCN PAM
gaauauagaguuggagaauu

SEQ ID NO: 30438 - RNA, 20 nt, Artificial Sequence
  HTT spacer sequence TTCN PAM
gaaacuuuaaauacacugaa

SEQ ID NO: 30439 - RNA, 20 nt, Artificial Sequence
  HTT spacer sequence TTCN PAM
ccaacucuauauucugaaac

SEQ ID NO: 30440 - RNA, 20 nt, Artificial Sequence
  HTT spacer sequence TTCN PAM
uaaaagcuuuaaugggucuu

SEQ ID NO: 30441 - RNA, 20 nt, Artificial Sequence
  HTT spacer sequence TTCN PAM
ucacccagguauuaagcuua

SEQ ID NO: 30442 - RNA, 20 nt, Artificial Sequence
  HTT spacer sequence TTCN PAM
agguguuguugaccuaaaau

SEQ ID NO: 30443 - RNA, 20 nt, Artificial Sequence
  HTT spacer sequence TTCN PAM
uuuuaggucaacaacaccuu

SEQ ID NO: 30444 - RNA, 20 nt, Artificial Sequence
  HTT spacer sequence TTCN PAM
ucauuuuaggucaacaacac

SEQ ID NO: 30445 - RNA, 20 nt, Artificial Sequence
  HTT spacer sequence TTCN PAM
uaguuuuccucucaggguuc

SEQ ID NO: 30446 - RNA, 20 nt, Artificial Sequence
  HTT spacer sequence TTCN PAM
ucucaggguucucaaauauu

SEQ ID NO: 30447 - RNA, 20 nt, Artificial Sequence
  HTT spacer sequence TTCN PAM
caaauauuaaaauucagcca

SEQ ID NO: 30448 - RNA, 20 nt, Artificial Sequence
  HTT spacer sequence TTCN PAM
gccaaauuugaauuuauggu

SEQ ID NO: 30449 - RNA, 20 nt, Artificial Sequence
  HTT spacer sequence TTCN PAM
aauuuggcugaauuuuaaua

SEQ ID NO: 30450 - RNA, 20 nt, Artificial Sequence
  HTT spacer sequence TTCN PAM
uuuaaaccauaaauucaaau

SEQ ID NO: 30451 - RNA, 20 nt, Artificial Sequence
  HTT spacer sequence TTCN PAM
gauacugaaccaauuuugua

SEQ ID NO: 30452 - RNA, 20 nt, Artificial Sequence
  HTT spacer sequence TTCN PAM
auuaauaugguguauuauag

SEQ ID NO: 30453 - RNA, 20 nt, Artificial Sequence
  HTT spacer sequence TTCN PAM
uagauaucauuuaucaggcu

SEQ ID NO: 30454 - RNA, 20 nt, Artificial Sequence
  HTT spacer sequence TTCN PAM
cauuuaaguaugauguuggc

SEQ ID NO: 30455 - RNA, 20 nt, Artificial Sequence
  HTT spacer sequence TTCN PAM
ccuguaauuccagcacuuug

SEQ ID NO: 30456 - RNA, 20 nt, Artificial Sequence
  HTT spacer sequence TTCN PAM
uauauauuagcaauuaaaau

SEQ ID NO: 30457 - RNA, 20 nt, Artificial Sequence
  HTT spacer sequence TTCN PAM
uuuuuuuuggauuuuaauug

SEQ ID NO: 30458 - RNA, 20 nt, Artificial Sequence
  HTT spacer sequence TTCN PAM
uaauuucuuuuuuuuuggau

SEQ ID NO: 30459 - RNA, 20 nt, Artificial Sequence
  HTT spacer sequence TTCN PAM
cuuuguauaguaucaaaaaa

SEQ ID NO: 30460 - RNA, 20 nt, Artificial Sequence
  HTT spacer sequence TTCN PAM
uuuuugauacuauacaaagg

SEQ ID NO: 30461 - RNA, 20 nt, Artificial Sequence
  HTT spacer sequence TTCN PAM
uaaguauuuuauucuuuuuu

SEQ ID NO: 30462 - RNA, 20 nt, Artificial Sequence
  HTT spacer sequence TTCN PAM
uucuuaaguauuuuauucuu

SEQ ID NO: 30463 - RNA, 20 nt, Artificial Sequence
  HTT spacer sequence TTCN PAM
ugagaucuucuuuaauuuuu

SEQ ID NO: 30464 - RNA, 20 nt, Artificial Sequence
  HTT spacer sequence TTCN PAM
auuucuugagaucuucuuua

SEQ ID NO: 30465 - RNA, 20 nt, Artificial Sequence
  HTT spacer sequence TTCN PAM
uggaucagaagacuuaauau

SEQ ID NO: 30466 - RNA, 20 nt, Artificial Sequence
  HTT spacer sequence TTCN PAM
gauccacgaacaggagaugu

SEQ ID NO: 30467 - RNA, 20 nt, Artificial Sequence
  HTT spacer sequence TTCN PAM
aaacuuaguacaaagcuaca

SEQ ID NO: 30468 - RNA, 20 nt, Artificial Sequence
  HTT spacer sequence TTCN PAM
aucaagaccguuuaaugauu

SEQ ID NO: 30469 - RNA, 20 nt, Artificial Sequence
  HTT spacer sequence TTCN PAM
gaaaaauugagacuuuggag

SEQ ID NO: 30470 - RNA, 20 nt, Artificial Sequence
  HTT spacer sequence TTCN PAM
gaaacuaaauagcagguuga

SEQ ID NO: 30471 - RNA, 20 nt, Artificial Sequence
  HTT spacer sequence TTCN PAM
ccauguuggccaggcugguc

SEQ ID NO: 30472 - RNA, 20 nt, Artificial Sequence
  HTT spacer sequence TTCN PAM
agaccagccuggccaacaug

SEQ ID NO: 30473 - RNA, 20 nt, Artificial Sequence
  HTT spacer sequence TTCN PAM
gaauuuccuuuuuuuaaaag

SEQ ID NO: 30474 - RNA, 20 nt, Artificial Sequence
  HTT spacer sequence TTCN PAM
gaaauacgcuacaacuugga

SEQ ID NO: 30475 - RNA, 20 nt, Artificial Sequence
  HTT spacer sequence TTCN PAM
uuuuuuuaaaaggcugaaua

SEQ ID NO: 30476 - RNA, 20 nt, Artificial Sequence
  HTT spacer sequence TTCN PAM
gccuuuuaaaaaaaggaaau

SEQ ID NO: 30477 - RNA, 20 nt, Artificial Sequence
  HTT spacer sequence TTCN PAM
acuguguauauauacugcau

SEQ ID NO: 30478 - RNA, 20 nt, Artificial Sequence
  HTT spacer sequence TTCN PAM
uccacagacaccuggguugu

SEQ ID NO: 30479 - RNA, 20 nt, Artificial Sequence
  HTT spacer sequence TTCN PAM
ccauagcaaaaaacaaccca

SEQ ID NO: 30480 - RNA, 20 nt, Artificial Sequence
  HTT spacer sequence TTCN PAM
uugcagcauaauucaccaua

SEQ ID NO: 30481 - RNA, 20 nt, Artificial Sequence
  HTT spacer sequence TTCN PAM
auucuguguguguguuuuuu

SEQ ID NO: 30482 - RNA, 20 nt, Artificial Sequence
  HTT spacer sequence TTCN PAM
guguguguguuuuuuuguuu

SEQ ID NO: 30483 - RNA, 20 nt, Artificial Sequence
  HTT spacer sequence TTCN PAM
ccauguuggcuggucucaaa

SEQ ID NO: 30484 - RNA, 20 nt, Artificial Sequence
  HTT spacer sequence TTCN PAM
ggugauccacccaccucggc

SEQ ID NO: 30485 - RNA, 20 nt, Artificial Sequence
  HTT spacer sequence TTCN PAM
guucacuaguaaguuaugaa

SEQ ID NO: 30486 - RNA, 20 nt, Artificial Sequence
  HTT spacer sequence TTCN PAM
cuaguaaguuaugaaaucac

SEQ ID NO: 30487 - RNA, 20 nt, Artificial Sequence
  HTT spacer sequence TTCN PAM
uaacuuacuagugaacagaa

SEQ ID NO: 30488 - RNA, 20 nt, Artificial Sequence
  HTT spacer sequence TTCN PAM
gguaaaggggcugccaacuu

SEQ ID NO: 30489 - RNA, 20 nt, Artificial Sequence
  HTT spacer sequence TTCN PAM
gucacaacaucuggagguau

SEQ ID NO: 30490 - RNA, 20 nt, Artificial Sequence
  HTT spacer sequence TTCN PAM
gucccaaucuacauucuguc

SEQ ID NO: 30491 - RNA, 20 nt, Artificial Sequence
  HTT spacer sequence TTCN PAM
ccuccuucagucccaaucua

SEQ ID NO: 30492 - RNA, 20 nt, Artificial Sequence
  HTT spacer sequence TTCN PAM
aaaaaagccuuugaggaaug

SEQ ID NO: 30493 - RNA, 20 nt, Artificial Sequence
  HTT spacer sequence TTCN PAM
ucaaaggcuuuuuuggaagg

SEQ ID NO: 30494 - RNA, 20 nt, Artificial Sequence
  HTT spacer sequence TTCN PAM
ugcugagcccugcauauauu

SEQ ID NO: 30495 - RNA, 20 nt, Artificial Sequence
  HTT spacer sequence TTCN PAM
uccgcugugacaugagugac

SEQ ID NO: 30496 - RNA, 20 nt, Artificial Sequence
  HTT spacer sequence TTCN PAM
cauggcucccugggccuccg

SEQ ID NO: 30497 - RNA, 20 nt, Artificial Sequence
  HTT spacer sequence TTCN PAM
uugcucugagagcaagcaga

SEQ ID NO: 30498 - RNA, 20 nt, Artificial Sequence
  HTT spacer sequence TTCN PAM
cugcacacugaggagcuggg

SEQ ID NO: 30499 - RNA, 20 nt, Artificial Sequence
  HTT spacer sequence TTCN PAM
uuuagugagaauucagcggc

SEQ ID NO: 30500 - RNA, 20 nt, Artificial Sequence
  HTT spacer sequence TTCN PAM
cacuaaaggaauaagcaucu

SEQ ID NO: 30501 - RNA, 20 nt, Artificial Sequence
  HTT spacer sequence TTCN PAM
gcggccaguuccacacccca

SEQ ID NO: 30502 - RNA, 20 nt, Artificial Sequence
  HTT spacer sequence TTCN PAM
acaccccacagauaaauggc

SEQ ID NO: 30503 - RNA, 20 nt, Artificial Sequence
  HTT spacer sequence TTCN PAM
uguuggauauucacauuaau

SEQ ID NO: 30504 - RNA, 20 nt, Artificial Sequence
  HTT spacer sequence TTCN PAM
cauuaaugguauucuagugu

SEQ ID NO: 30505 - RNA, 20 nt, Artificial Sequence
  HTT spacer sequence TTCN PAM
aguguuugugauuugaacug

SEQ ID NO: 30506 - RNA, 20 nt, Artificial Sequence
  HTT spacer sequence TTCN PAM
aaucacaaacacuagaauac

SEQ ID NO: 30507 - RNA, 20 nt, Artificial Sequence
  HTT spacer sequence TTCN PAM
aaaaagaugucucuggcugg

SEQ ID NO: 30508 - RNA, 20 nt, Artificial Sequence
  HTT spacer sequence TTCN PAM
uaucacaauaucccaggacc

SEQ ID NO: 30509 - RNA, 20 nt, Artificial Sequence
  HTT spacer sequence TTCN PAM
uccugucuucaucugggaug

SEQ ID NO: 30510 - RNA, 20 nt, Artificial Sequence
  HTT spacer sequence TTCN PAM
ugucuucaucugggaugcca

SEQ ID NO: 30511 - RNA, 20 nt, Artificial Sequence
  HTT spacer sequence TTCN PAM
ucugggaugccacagaggcc

SEQ ID NO: 30512 - RNA, 20 nt, Artificial Sequence
  HTT spacer sequence TTCN PAM
uggccucuguggcaucccag

SEQ ID NO: 30513 - RNA, 20 nt, Artificial Sequence
  HTT spacer sequence TTCN PAM
guccacgcuuuuguccuuca

SEQ ID NO: 30514 - RNA, 20 nt, Artificial Sequence
  HTT spacer sequence TTCN PAM
caucccucuccugggcaugu

SEQ ID NO: 30515 - RNA, 20 nt, Artificial Sequence
  HTT spacer sequence TTCN PAM
guaaaacagagauaauaauc

SEQ ID NO: 30516 - RNA, 20 nt, Artificial Sequence
  HTT spacer sequence TTCN PAM
ccuucuguaaaacagagaua

SEQ ID NO: 30517 - RNA, 20 nt, Artificial Sequence
  HTT spacer sequence TTCN PAM
guuaucaagcagcaugcuuc

SEQ ID NO: 30518 - RNA, 20 nt, Artificial Sequence
  HTT spacer sequence TTCN PAM
ugggagugagggugucagcu

SEQ ID NO: 30519 - RNA, 20 nt, Artificial Sequence
  HTT spacer sequence TTCN PAM
cuucuugggagugagggugu

SEQ ID NO: 30520 - RNA, 20 nt, Artificial Sequence
  HTT spacer sequence TTCN PAM
auuucacugcuuuuuucauu

SEQ ID NO: 30521 - RNA, 20 nt, Artificial Sequence
  HTT spacer sequence TTCN PAM
cugcuuuuuucauucauucu

SEQ ID NO: 30522 - RNA, 20 nt, Artificial Sequence
  HTT spacer sequence TTCN PAM
uucauucuauuucacuucug

SEQ ID NO: 30523 - RNA, 20 nt, Artificial Sequence
  HTT spacer sequence TTCN PAM
uucuauuucacuucuguuuu

SEQ ID NO: 30524 - RNA, 20 nt, Artificial Sequence
  HTT spacer sequence TTCN PAM
auuucacuucuguuuucacu

SEQ ID NO: 30525 - RNA, 20 nt, Artificial Sequence
  HTT spacer sequence TTCN PAM
cuucuguuuucacuuauagc

SEQ ID NO: 30526 - RNA, 20 nt, Artificial Sequence
  HTT spacer sequence TTCN PAM
guuuucacuuauagcguuag

SEQ ID NO: 30527 - RNA, 20 nt, Artificial Sequence
  HTT spacer sequence TTCN PAM
cuuauagcguuagaaccuaa

SEQ ID NO: 30528 - RNA, 20 nt, Artificial Sequence
  HTT spacer sequence TTCN PAM
agaguugcccauaacuaccu

SEQ ID NO: 30529 - RNA, 20 nt, Artificial Sequence
  HTT spacer sequence TTCN PAM
ccucuuagguaguuaugggc

SEQ ID NO: 30530 - RNA, 20 nt, Artificial Sequence
  HTT spacer sequence TTCN PAM
aaugguuccccucuuaggua

SEQ ID NO: 30531 - RNA, 20 nt, Artificial Sequence
  HTT spacer sequence TTCN PAM
ucaaaugguuccccucuuag

SEQ ID NO: 30532 - RNA, 20 nt, Artificial Sequence
  HTT spacer sequence TTCN PAM
ugguauucuucaaaugguuc

SEQ ID NO: 30533 - RNA, 20 nt, Artificial Sequence
  HTT spacer sequence TTCN PAM
caguuuuuacaauggaaaug

SEQ ID NO: 30534 - RNA, 20 nt, Artificial Sequence
  HTT spacer sequence TTCN PAM
auuguaaaaacugagaaaaa

SEQ ID NO: 30535 - RNA, 20 nt, Artificial Sequence
  HTT spacer sequence TTCN PAM
agccauuuccauuguaaaaa

SEQ ID NO: 30536 - RNA, 20 nt, Artificial Sequence
  HTT spacer sequence TTCN PAM
gccucagccuccugaguagc

SEQ ID NO: 30537 - RNA, 20 nt, Artificial Sequence
  HTT spacer sequence TTCN PAM
aggcuauaguacgggaugau

SEQ ID NO: 30538 - RNA, 20 nt, Artificial Sequence
  HTT spacer sequence TTCN PAM
ucuaauuuaauagacucugu

SEQ ID NO: 30539 - RNA, 20 nt, Artificial Sequence
  HTT spacer sequence TTCN PAM
aauuuaauagacucuguucu

SEQ ID NO: 30540 - RNA, 20 nt, Artificial Sequence
  HTT spacer sequence TTCN PAM
cucuuuuuaaaauggcaggu

SEQ ID NO: 30541 - RNA, 20 nt, Artificial Sequence
  HTT spacer sequence TTCN PAM
guggcuagaaaauaaaacuu

SEQ ID NO: 30542 - RNA, 20 nt, Artificial Sequence
  HTT spacer sequence TTCN PAM
agccacugaaccaacaggga

SEQ ID NO: 30543 - RNA, 20 nt, Artificial Sequence
  HTT spacer sequence TTCN PAM
uuuuucaaaggauggcacaa

SEQ ID NO: 30544 - RNA, 20 nt, Artificial Sequence
  HTT spacer sequence TTCN PAM
aaggauggcacaacguauau

SEQ ID NO: 30545 - RNA, 20 nt, Artificial Sequence
  HTT spacer sequence TTCN PAM
ugccucagccucccgaguag

SEQ ID NO: 30546 - RNA, 20 nt, Artificial Sequence
  HTT spacer sequence TTCN PAM
ucuuuuuuuuuuuuuuuuuu

SEQ ID NO: 30547 - RNA, 20 nt, Artificial Sequence
  HTT spacer sequence TTCN PAM
gcucaaaggggaugcccggg

SEQ ID NO: 30548 - RNA, 20 nt, Artificial Sequence
  HTT spacer sequence TTCN PAM
auaaaugaggcgaagacaag

SEQ ID NO: 30549 - RNA, 20 nt, Artificial Sequence
  HTT spacer sequence TTCN PAM
ccucauuuauugaaccauuc

SEQ ID NO: 30550 - RNA, 20 nt, Artificial Sequence
  HTT spacer sequence TTCN PAM
uuuuuaaaagaacaaugcaa

SEQ ID NO: 30551 - RNA, 20 nt, Artificial Sequence
  HTT spacer sequence TTCN PAM
uuuaaaaaagaaaaguuuac

SEQ ID NO: 30552 - RNA, 20 nt, Artificial Sequence
  HTT spacer sequence TTCN PAM
ggucucacauugcauuguuc

SEQ ID NO: 30553 - RNA, 20 nt, Artificial Sequence
  HTT spacer sequence TTCN PAM
cauugauuaggcaacccgua

SEQ ID NO: 30554 - RNA, 20 nt, Artificial Sequence
  HTT spacer sequence TTCN PAM
uuguuacggguugccuaauc

SEQ ID NO: 30555 - RNA, 20 nt, Artificial Sequence
  HTT spacer sequence TTCN PAM
aggaaaaggcggauuuggag

SEQ ID NO: 30556 - RNA, 20 nt, Artificial Sequence
  HTT spacer sequence TTCN PAM
uagaacucuguaaugucuaa

SEQ ID NO: 30557 - RNA, 20 nt, Artificial Sequence
  HTT spacer sequence TTCN PAM
uagcagcgcugcuagcuggg

SEQ ID NO: 30558 - RNA, 20 nt, Artificial Sequence
  HTT spacer sequence TTCN PAM
caggaccuugcuccccaccc

SEQ ID NO: 30559 - RNA, 20 nt, Artificial Sequence
  HTT spacer sequence TTCN PAM
gguaaugcaucagcucuccc

SEQ ID NO: 30560 - RNA, 20 nt, Artificial Sequence
  HTT spacer sequence TTCN PAM
caaaacacccacuaaggcaa

SEQ ID NO: 30561 - RNA, 20 nt, Artificial Sequence
  HTT spacer sequence TTCN PAM
cacaguuggcaaagauuauu

SEQ ID NO: 30562 - RNA, 20 nt, Artificial Sequence
  HTT spacer sequence TTCN PAM
auguggauucucacaguugg

SEQ ID NO: 30563 - RNA, 20 nt, Artificial Sequence
  HTT spacer sequence TTCN PAM
uaaaaaccuuuugcucaaaa

SEQ ID NO: 30564 - RNA, 20 nt, Artificial Sequence
  HTT spacer sequence TTCN PAM
cuuggugacuucaccuuuua

SEQ ID NO: 30565 - RNA, 20 nt, Artificial Sequence
  HTT spacer sequence TTCN PAM
ccuuuuaccucauaguucug

SEQ ID NO: 30566 - RNA, 20 nt, Artificial Sequence
  HTT spacer sequence TTCN PAM
gaagaagcugguuuccaugc

SEQ ID NO: 30567 - RNA, 20 nt, Artificial Sequence
  HTT spacer sequence TTCN PAM
gaacuaugagguaaaaggug

SEQ ID NO: 30568 - RNA, 20 nt, Artificial Sequence
  HTT spacer sequence TTCN PAM
ucagaacuaugagguaaaag

SEQ ID NO: 30569 - RNA, 20 nt, Artificial Sequence
  HTT spacer sequence TTCN PAM
augcuugaugccccagcuca

SEQ ID NO: 30570 - RNA, 20 nt, Artificial Sequence
  HTT spacer sequence TTCN PAM
aucugggcaaagugacugag

SEQ ID NO: 30571 - RNA, 20 nt, Artificial Sequence
  HTT spacer sequence TTCN PAM
guuuccgcauuguggaauuu

SEQ ID NO: 30572 - RNA, 20 nt, Artificial Sequence
  HTT spacer sequence TTCN PAM
gcauuguggaauuuccauga

SEQ ID NO: 30573 - RNA, 20 nt, Artificial Sequence
  HTT spacer sequence TTCN PAM
acaaugcggaaacagaaucg

SEQ ID NO: 30574 - RNA, 20 nt, Artificial Sequence
  HTT spacer sequence TTCN PAM
augauucuauuuccauacau

SEQ ID NO: 30575 - RNA, 20 nt, Artificial Sequence
  HTT spacer sequence TTCN PAM
auuuccauacauuuaagacu

SEQ ID NO: 30576 - RNA, 20 nt, Artificial Sequence
  HTT spacer sequence TTCN PAM
auacauuuaagacugguccc

SEQ ID NO: 30577 - RNA, 20 nt, Artificial Sequence
  HTT spacer sequence TTCN PAM
cauaguacagagugaauuag

SEQ ID NO: 30578 - RNA, 20 nt, Artificial Sequence
  HTT spacer sequence TTCN PAM
cucuguacuaugugaauuug

SEQ ID NO: 30579 - RNA, 20 nt, Artificial Sequence
  HTT spacer sequence TTCN PAM
aaacaccuuuugauguaggu

SEQ ID NO: 30580 - RNA, 20 nt, Artificial Sequence
  HTT spacer sequence TTCN PAM
caaauugacacauuuccaaa

SEQ ID NO: 30581 - RNA, 20 nt, Artificial Sequence
  HTT spacer sequence TTCN PAM
uuaggauuuucccaaauuga

SEQ ID NO: 30582 - RNA, 20 nt, Artificial Sequence
  HTT spacer sequence TTCN PAM
cucuuguugccuagacugga

SEQ ID NO: 30583 - RNA, 20 nt, Artificial Sequence
  HTT spacer sequence TTCN PAM
agcgauucuccugccucagc

SEQ ID NO: 30584 - RNA, 20 nt, Artificial Sequence
  HTT spacer sequence TTCN PAM
ccugccucagccucccgagu

SEQ ID NO: 30585 - RNA, 20 nt, Artificial Sequence
  HTT spacer sequence TTCN PAM
uauuuuuaguagagaggggg

SEQ ID NO: 30586 - RNA, 20 nt, Artificial Sequence
  HTT spacer sequence TTCN PAM
ccauguuggucagggugguc

SEQ ID NO: 30587 - RNA, 20 nt, Artificial Sequence
  HTT spacer sequence TTCN PAM
agaccacccugaccaacaug

SEQ ID NO: 30588 - RNA, 20 nt, Artificial Sequence
  HTT spacer sequence TTCN PAM
ccauccaccaacuacagugg

SEQ ID NO: 30589 - RNA, 20 nt, Artificial Sequence
  HTT spacer sequence TTCN PAM
ggucuggggauuuaaagaga

SEQ ID NO: 30590 - RNA, 20 nt, Artificial Sequence
  HTT spacer sequence TTCN PAM
agaacuuuuaagucccuaag

SEQ ID NO: 30591 - RNA, 20 nt, Artificial Sequence
  HTT spacer sequence TTCN PAM
ugaacuccauaugaucacuc

SEQ ID NO: 30592 - RNA, 20 nt, Artificial Sequence
  HTT spacer sequence TTCN PAM
aaggaaaagccacuagcauu

SEQ ID NO: 30593 - RNA, 20 nt, Artificial Sequence
  HTT spacer sequence TTCN PAM
uuugaauuguaauaugggag

SEQ ID NO: 30594 - RNA, 20 nt, Artificial Sequence
  HTT spacer sequence TTCN PAM
aggcaaugcuaguggcuuuu

SEQ ID NO: 30595 - RNA, 20 nt, Artificial Sequence
  HTT spacer sequence TTCN PAM
aauuaacuucaaggcaaugc

SEQ ID NO: 30596 - RNA, 20 nt, Artificial Sequence
  HTT spacer sequence TTCN PAM
ugucaugucaagcugcaggu

SEQ ID NO: 30597 - RNA, 20 nt, Artificial Sequence
  HTT spacer sequence TTCN PAM
ggagaaguaacaguacuguc

SEQ ID NO: 30598 - RNA, 20 nt, Artificial Sequence
  HTT spacer sequence TTCN PAM
ccugaaguaacaacuacguu

SEQ ID NO: 30599 - RNA, 20 nt, Artificial Sequence
  HTT spacer sequence TTCN PAM
agagaccaugaagaauauuu

SEQ ID NO: 30600 - RNA, 20 nt, Artificial Sequence
  HTT spacer sequence TTCN PAM
uggucucuggaacuguacca

SEQ ID NO: 30601 - RNA, 20 nt, Artificial Sequence
  HTT spacer sequence TTCN PAM
ucauggucucuggaacugua

SEQ ID NO: 30602 - RNA, 20 nt, Artificial Sequence
  HTT spacer sequence TTCN PAM
guaagaaauccacccucugu

SEQ ID NO: 30603 - RNA, 20 nt, Artificial Sequence
  HTT spacer sequence TTCN PAM
uacagaaauaucuaucaugg

SEQ ID NO: 30604 - RNA, 20 nt, Artificial Sequence
  HTT spacer sequence TTCN PAM
aacagaggguggauuucuua

SEQ ID NO: 30605 - RNA, 20 nt, Artificial Sequence
  HTT spacer sequence TTCN PAM
aggacauauucaaacagagg

SEQ ID NO: 30606 - RNA, 20 nt, Artificial Sequence
  HTT spacer sequence TTCN PAM
uguucuaggacauauucaaa

SEQ ID NO: 30607 - RNA, 20 nt, Artificial Sequence
  HTT spacer sequence TTCN PAM
uacuuggacucuugcuaauc

SEQ ID NO: 30608 - RNA, 20 nt, Artificial Sequence
  HTT spacer sequence TTCN PAM
caaaaucugagucauuacau

SEQ ID NO: 30609 - RNA, 20 nt, Artificial Sequence
  HTT spacer sequence TTCN PAM
uucacaaaaucugagucauu

SEQ ID NO: 30610 - RNA, 20 nt, Artificial Sequence
  HTT spacer sequence TTCN PAM
ucuguucuuucacaaaaucu

SEQ ID NO: 30611 - RNA, 20 nt, Artificial Sequence
  HTT spacer sequence TTCN PAM
ggaacaugggucauguguuu

SEQ ID NO: 30612 - RNA, 20 nt, Artificial Sequence
  HTT spacer sequence TTCN PAM
agaaauuuuuccucuguucu

SEQ ID NO: 30613 - RNA, 20 nt, Artificial Sequence
  HTT spacer sequence TTCN PAM
uuuguaaacacaugacccau

SEQ ID NO: 30614 - RNA, 20 nt, Artificial Sequence
  HTT spacer sequence TTCN PAM
uuccuuuguaaacacaugac

SEQ ID NO: 30615 - RNA, 20 nt, Artificial Sequence
  HTT spacer sequence TTCN PAM
caauagcuaaaauuugcuaa

SEQ ID NO: 30616 - RNA, 20 nt, Artificial Sequence
  HTT spacer sequence TTCN PAM
ggaggccaagguaggcagau

SEQ ID NO: 30617 - RNA, 20 nt, Artificial Sequence
  HTT spacer sequence TTCN PAM
gggcucaagcgaucugccua

SEQ ID NO: 30618 - RNA, 20 nt, Artificial Sequence
  HTT spacer sequence TTCN PAM
agaucagccuaggcaacaug

SEQ ID NO: 30619 - RNA, 20 nt, Artificial Sequence
  HTT spacer sequence TTCN PAM
uuuuuaauguauuuauuuau

SEQ ID NO: 30620 - RNA, 20 nt, Artificial Sequence
  HTT spacer sequence TTCN PAM
uaucuucuuuuuuaauguau

SEQ ID NO: 30621 - RNA, 20 nt, Artificial Sequence
  HTT spacer sequence TTCN PAM
caaacaaaugauuggcugca

SEQ ID NO: 30622 - RNA, 20 nt, Artificial Sequence
  HTT spacer sequence TTCN PAM
ugcagccaaucauuuguuug

SEQ ID NO: 30623 - RNA, 20 nt, Artificial Sequence
  HTT spacer sequence TTCN PAM
cacagacuugcucuggaggu

SEQ ID NO: 30624 - RNA, 20 nt, Artificial Sequence
  HTT spacer sequence TTCN PAM
gaguaggggugagcugacug

SEQ ID NO: 30625 - RNA, 20 nt, Artificial Sequence
  HTT spacer sequence TTCN PAM
gacaggcauucagaguaggg

SEQ ID NO: 30626 - RNA, 20 nt, Artificial Sequence
  HTT spacer sequence TTCN PAM
aaucgugcauuugcuuuuuc

SEQ ID NO: 30627 - RNA, 20 nt, Artificial Sequence
  HTT spacer sequence TTCN PAM
aagugcuagcacuuccucca

SEQ ID NO: 30628 - RNA, 20 nt, Artificial Sequence
  HTT spacer sequence TTCN PAM
uccagugggcuugagagagc

SEQ ID NO: 30629 - RNA, 20 nt, Artificial Sequence
  HTT spacer sequence TTCN PAM
uucgcuuaugcuugaagucc

SEQ ID NO: 30630 - RNA, 20 nt, Artificial Sequence
  HTT spacer sequence TTCN PAM
cuuaugcuugaaguccuccg

SEQ ID NO: 30631 - RNA, 20 nt, Artificial Sequence
  HTT spacer sequence TTCN PAM
agcauaagcgaaagaauuac

SEQ ID NO: 30632 - RNA, 20 nt, Artificial Sequence
  HTT spacer sequence TTCN PAM
gaggacuucaagcauaagcg

SEQ ID NO: 30633 - RNA, 20 nt, Artificial Sequence
  HTT spacer sequence TTCN PAM
uuucggaggacuucaagcau

SEQ ID NO: 30634 - RNA, 20 nt, Artificial Sequence
  HTT spacer sequence TTCN PAM
uuuaccauugugcucacuca

SEQ ID NO: 30635 - RNA, 20 nt, Artificial Sequence
  HTT spacer sequence TTCN PAM
acuacagucuguggccuaaa

SEQ ID NO: 30636 - RNA, 20 nt, Artificial Sequence
  HTT spacer sequence TTCN PAM
gacgugggcagacccgaggu

SEQ ID NO: 30637 - RNA, 20 nt, Artificial Sequence
  HTT spacer sequence TTCN PAM
agcagcgugaucuugggccc

SEQ ID NO: 30638 - RNA, 20 nt, Artificial Sequence
  HTT spacer sequence TTCN PAM
cugcuagagaugagaucacg

SEQ ID NO: 30639 - RNA, 20 nt, Artificial Sequence
  HTT spacer sequence TTCN PAM
cacccagcucucagcacagu

SEQ ID NO: 30640 - RNA, 20 nt, Artificial Sequence
  HTT spacer sequence TTCN PAM
auucccuuucucugauuugc

SEQ ID NO: 30641 - RNA, 20 nt, Artificial Sequence
  HTT spacer sequence TTCN PAM
cuuucucugauuugcccauu

SEQ ID NO: 30642 - RNA, 20 nt, Artificial Sequence
  HTT spacer sequence TTCN PAM
cugauuugcccauuccacuu

SEQ ID NO: 30643 - RNA, 20 nt, Artificial Sequence
  HTT spacer sequence TTCN PAM
aagauaaugacuguuaauau

SEQ ID NO: 30644 - RNA, 20 nt, Artificial Sequence
  HTT spacer sequence TTCN PAM
aauauuuuccacaauuaacu

SEQ ID NO: 30645 - RNA, 20 nt, Artificial Sequence
  HTT spacer sequence TTCN PAM
acaauuaacuuuguauuucu

SEQ ID NO: 30646 - RNA, 20 nt, Artificial Sequence
  HTT spacer sequence TTCN PAM
uuuguguggccuaagaaaug

SEQ ID NO: 30647 - RNA, 20 nt, Artificial Sequence
  HTT spacer sequence TTCN PAM
uaggccacacaaaggaagcu

SEQ ID NO: 30648 - RNA, 20 nt, Artificial Sequence
  HTT spacer sequence TTCN PAM
uguggcucgcacuugacagg

SEQ ID NO: 30649 - RNA, 20 nt, Artificial Sequence
  HTT spacer sequence TTCN PAM
uuuuuuuuguagcuuuuugc

SEQ ID NO: 30650 - RNA, 20 nt, Artificial Sequence
  HTT spacer sequence TTCN PAM
uuauucuuuuuuuuuguagc

SEQ ID NO: 30651 - RNA, 20 nt, Artificial Sequence
  HTT spacer sequence TTCN PAM
ucuucuuuauucuuuuuuuu

SEQ ID NO: 30652 - RNA, 20 nt, Artificial Sequence
  HTT spacer sequence TTCN PAM
ccuuuccucuucuuuauucu

SEQ ID NO: 30653 - RNA, 20 nt, Artificial Sequence
  HTT spacer sequence TTCN PAM
cauuuagagccauagcuuca

SEQ ID NO: 30654 - RNA, 20 nt, Artificial Sequence
  HTT spacer sequence TTCN PAM
uuucucauuuagagccauag

SEQ ID NO: 30655 - RNA, 20 nt, Artificial Sequence
  HTT spacer sequence TTCN PAM
ggagaaagugcaaaguagau

SEQ ID NO: 30656 - RNA, 20 nt, Artificial Sequence
  HTT spacer sequence TTCN PAM
ccagaauucuuuucucauuu

SEQ ID NO: 30657 - RNA, 20 nt, Artificial Sequence
  HTT spacer sequence TTCN PAM
uaguaagugucuccucuuag

SEQ ID NO: 30658 - RNA, 20 nt, Artificial Sequence
  HTT spacer sequence TTCN PAM
cugugcauuguuugauucau

SEQ ID NO: 30659 - RNA, 20 nt, Artificial Sequence
  HTT spacer sequence TTCN PAM
uagcacuuuugucagccgac

SEQ ID NO: 30660 - RNA, 20 nt, Artificial Sequence
  HTT spacer sequence TTCN PAM
gugagcgugagcugagcggc

SEQ ID NO: 30661 - RNA, 20 nt, Artificial Sequence
  HTT spacer sequence TTCN PAM
acggcuucagugagcgugag

SEQ ID NO: 30662 - RNA, 20 nt, Artificial Sequence
  HTT spacer sequence TTCN PAM
uguuuucugaguuuaugugg

SEQ ID NO: 30663 - RNA, 20 nt, Artificial Sequence
  HTT spacer sequence TTCN PAM
gaguuuauguggggguuugc

SEQ ID NO: 30664 - RNA, 20 nt, Artificial Sequence
  HTT spacer sequence TTCN PAM
uucuuauucaaaccuuagaa

SEQ ID NO: 30665 - RNA, 20 nt, Artificial Sequence
  HTT spacer sequence TTCN PAM
uauucaaaccuuagaaaaca

SEQ ID NO: 30666 - RNA, 20 nt, Artificial Sequence
  HTT spacer sequence TTCN PAM
aaccuuagaaaacauagaag

SEQ ID NO: 30667 - RNA, 20 nt, Artificial Sequence
  HTT spacer sequence TTCN PAM
aagguuugaauaagaaagaa

SEQ ID NO: 30668 - RNA, 20 nt, Artificial Sequence
  HTT spacer sequence TTCN PAM
auguuuucuaagguuugaau

SEQ ID NO: 30669 - RNA, 20 nt, Artificial Sequence
  HTT spacer sequence TTCN PAM
aacuucugguuuguuauaaa

SEQ ID NO: 30670 - RNA, 20 nt, Artificial Sequence
  HTT spacer sequence TTCN PAM
gguuuguuauaaaucuguag

SEQ ID NO: 30671 - RNA, 20 nt, Artificial Sequence
  HTT spacer sequence TTCN PAM
gucacucuucacaccugcca

SEQ ID NO: 30672 - RNA, 20 nt, Artificial Sequence
  HTT spacer sequence TTCN PAM
caccugccagcuugcagagg

SEQ ID NO: 30673 - RNA, 20 nt, Artificial Sequence
  HTT spacer sequence TTCN PAM
uggugaauugcccuuuccuu

SEQ ID NO: 30674 - RNA, 20 nt, Artificial Sequence
  HTT spacer sequence TTCN PAM
ccaagaaacacggguaacua

SEQ ID NO: 30675 - RNA, 20 nt, Artificial Sequence
  HTT spacer sequence TTCN PAM
uuucccuuaucacagccagc

SEQ ID NO: 30676 - RNA, 20 nt, Artificial Sequence
  HTT spacer sequence TTCN PAM
cuuaucacagccagccagag

SEQ ID NO: 30677 - RNA, 20 nt, Artificial Sequence
  HTT spacer sequence TTCN PAM
cuggccccugggacacugug

SEQ ID NO: 30678 - RNA, 20 nt, Artificial Sequence
  HTT spacer sequence TTCN PAM
cucucucucucucuuuuuuu

SEQ ID NO: 30679 - RNA, 20 nt, Artificial Sequence
  HTT spacer sequence TTCN PAM
cucuguuguccaggcuggag

SEQ ID NO: 30680 - RNA, 20 nt, Artificial Sequence
  HTT spacer sequence TTCN PAM
aggcccaagugauccuccua

SEQ ID NO: 30681 - RNA, 20 nt, Artificial Sequence
  HTT spacer sequence TTCN PAM
uccaagccauuuauuucuua

SEQ ID NO: 30682 - RNA, 20 nt, Artificial Sequence
  HTT spacer sequence TTCN PAM
uagcccggagguuagcugcu

SEQ ID NO: 30683 - RNA, 20 nt, Artificial Sequence
  HTT spacer sequence TTCN PAM
gaguagcugggacuacaguc

SEQ ID NO: 30684 - RNA, 20 nt, Artificial Sequence
  HTT spacer sequence TTCN PAM
agcaauccucccaccacagc

SEQ ID NO: 30685 - RNA, 20 nt, Artificial Sequence
  HTT spacer sequence TTCN PAM
uuugcuuaaaugcuuugauu

SEQ ID NO: 30686 - RNA, 20 nt, Artificial Sequence
  HTT spacer sequence TTCN PAM
auaucguuggccucucccaa

SEQ ID NO: 30687 - RNA, 20 nt, Artificial Sequence
  HTT spacer sequence TTCN PAM
uugggagaggccaacgauau

SEQ ID NO: 30688 - RNA, 20 nt, Artificial Sequence
  HTT spacer sequence TTCN PAM
acaucugcuuaauauauauu

SEQ ID NO: 30689 - RNA, 20 nt, Artificial Sequence
  HTT spacer sequence TTCN PAM
uucaacaucugcuuaauaua

SEQ ID NO: 30690 - RNA, 20 nt, Artificial Sequence
  HTT spacer sequence TTCN PAM
caagaggagagaaaguaagg

SEQ ID NO: 30691 - RNA, 20 nt, Artificial Sequence
  HTT spacer sequence TTCN PAM
cuccucuugugaauauucau

SEQ ID NO: 30692 - RNA, 20 nt, Artificial Sequence
  HTT spacer sequence TTCN PAM
agggccagugagaauuccuu

SEQ ID NO: 30693 - RNA, 20 nt, Artificial Sequence
  HTT spacer sequence TTCN PAM
cacuggcccuugaauuagua

SEQ ID NO: 30694 - RNA, 20 nt, Artificial Sequence
  HTT spacer sequence TTCN PAM
uugugguuuaauucuguggu

SEQ ID NO: 30695 - RNA, 20 nt, Artificial Sequence
  HTT spacer sequence TTCN PAM
cagcaccucuguuacuguuu

SEQ ID NO: 30696 - RNA, 20 nt, Artificial Sequence
  HTT spacer sequence TTCN PAM
aggaaugaaaaucaaauaau

SEQ ID NO: 30697 - RNA, 20 nt, Artificial Sequence
  HTT spacer sequence TTCN PAM
uggaauaaauccaacuuggu

SEQ ID NO: 30698 - RNA, 20 nt, Artificial Sequence
  HTT spacer sequence TTCN PAM
uuccuggaauaaauccaacu

SEQ ID NO: 30699 - RNA, 20 nt, Artificial Sequence
  HTT spacer sequence TTCN PAM
cauuuaaucacuugguuaaa

SEQ ID NO: 30700 - RNA, 20 nt, Artificial Sequence
  HTT spacer sequence TTCN PAM
aauuguuaguggcugauuca

SEQ ID NO: 30701 - RNA, 20 nt, Artificial Sequence
  HTT spacer sequence TTCN PAM
auuuucuaauuguuaguggc

SEQ ID NO: 30702 - RNA, 20 nt, Artificial Sequence
  HTT spacer sequence TTCN PAM
ugaugccauuguaaauggua

SEQ ID NO: 30703 - RNA, 20 nt, Artificial Sequence
  HTT spacer sequence TTCN PAM
ccugccucagccucccgagu

SEQ ID NO: 30704 - RNA, 20 nt, Artificial Sequence
  HTT spacer sequence TTCN PAM
agcgauucuccugccucagc

SEQ ID NO: 30705 - RNA, 20 nt, Artificial Sequence
  HTT spacer sequence TTCN PAM
uguucuguuuuuaugauguu

SEQ ID NO: 30706 - RNA, 20 nt, Artificial Sequence
  HTT spacer sequence TTCN PAM
guuuuuaugauguugcuguc

SEQ ID NO: 30707 - RNA, 20 nt, Artificial Sequence
  HTT spacer sequence TTCN PAM
uaagcguaggcuaaacuaac

SEQ ID NO: 30708 - RNA, 20 nt, Artificial Sequence
  HTT spacer sequence TTCN PAM
uaauggugagcaccaagcac

SEQ ID NO: 30709 - RNA, 20 nt, Artificial Sequence
  HTT spacer sequence TTCN PAM
aauccccuccauucauaaug

SEQ ID NO: 30710 - RNA, 20 nt, Artificial Sequence
  HTT spacer sequence TTCN PAM
cauuuacaaccugggcaauc

SEQ ID NO: 30711 - RNA, 20 nt, Artificial Sequence
  HTT spacer sequence TTCN PAM
augcugcagagcuguguugc

SEQ ID NO: 30712 - RNA, 20 nt, Artificial Sequence
  HTT spacer sequence TTCN PAM
aagccgcaacacagcucugc

SEQ ID NO: 30713 - RNA, 20 nt, Artificial Sequence
  HTT spacer sequence TTCN PAM
cucuguaaaucuuccaagcc

SEQ ID NO: 30714 - RNA, 20 nt, Artificial Sequence
  HTT spacer sequence TTCN PAM
uucccucuguaaaucuucca

SEQ ID NO: 30715 - RNA, 20 nt, Artificial Sequence
  HTT spacer sequence TTCN PAM
uaccuguauacaauucuuuc

SEQ ID NO: 30716 - RNA, 20 nt, Artificial Sequence
  HTT spacer sequence TTCN PAM
cccagcccuaggcuucccug

SEQ ID NO: 30717 - RNA, 20 nt, Artificial Sequence
  HTT spacer sequence TTCN PAM
cugguucacacuggcugcuu

SEQ ID NO: 30718 - RNA, 20 nt, Artificial Sequence
  HTT spacer sequence TTCN PAM
cacuggcugcuuccaggaug

SEQ ID NO: 30719 - RNA, 20 nt, Artificial Sequence
  HTT spacer sequence TTCN PAM
aggaugggcaggagaauagc

SEQ ID NO: 30720 - RNA, 20 nt, Artificial Sequence
  HTT spacer sequence TTCN PAM
ccugcccauccuggaagcag

SEQ ID NO: 30721 - RNA, 20 nt, Artificial Sequence
  HTT spacer sequence TTCN PAM
uaggguuggucacuuacacu

SEQ ID NO: 30722 - RNA, 20 nt, Artificial Sequence
  HTT spacer sequence TTCN PAM
aauaguguaagugaccaacc

SEQ ID NO: 30723 - RNA, 20 nt, Artificial Sequence
  HTT spacer sequence TTCN PAM
auauaaccuacacacauccu

SEQ ID NO: 30724 - RNA, 20 nt, Artificial Sequence
  HTT spacer sequence TTCN PAM
cuuggauaucaaaauccaag

SEQ ID NO: 30725 - RNA, 20 nt, Artificial Sequence
  HTT spacer sequence TTCN PAM
uuguaccuuugcacaaggug

SEQ ID NO: 30726 - RNA, 20 nt, Artificial Sequence
  HTT spacer sequence TTCN PAM
ugugugggugccacucucca

SEQ ID NO: 30727 - RNA, 20 nt, Artificial Sequence
  HTT spacer sequence TTCN PAM
ugucauucugagagacuccu

SEQ ID NO: 30728 - RNA, 20 nt, Artificial Sequence
  HTT spacer sequence TTCN PAM
gagagacuccugcucauccg

SEQ ID NO: 30729 - RNA, 20 nt, Artificial Sequence
  HTT spacer sequence TTCN PAM
ugggaguccuugaucucauu

SEQ ID NO: 30730 - RNA, 20 nt, Artificial Sequence
  HTT spacer sequence TTCN PAM
uccuauucugauggaccuuu

SEQ ID NO: 30731 - RNA, 20 nt, Artificial Sequence
  HTT spacer sequence TTCN PAM
uauucugauggaccuuuggc

SEQ ID NO: 30732 - RNA, 20 nt, Artificial Sequence
  HTT spacer sequence TTCN PAM
gauggaccuuuggcuucucc

SEQ ID NO: 30733 - RNA, 20 nt, Artificial Sequence
  HTT spacer sequence TTCN PAM
ccuuaucuuauauaucccac

SEQ ID NO: 30734 - RNA, 20 nt, Artificial Sequence
  HTT spacer sequence TTCN PAM
ucaacucaggcgaccaccuc

SEQ ID NO: 30735 - RNA, 20 nt, Artificial Sequence
  HTT spacer sequence TTCN PAM
augguccaauaccaccagac

SEQ ID NO: 30736 - RNA, 20 nt, Artificial Sequence
  HTT spacer sequence TTCN PAM
uuuguuacuccuggaguaaa

SEQ ID NO: 30737 - RNA, 20 nt, Artificial Sequence
  HTT spacer sequence TTCN PAM
caggugacuacggcugagcc

SEQ ID NO: 30738 - RNA, 20 nt, Artificial Sequence
  HTT spacer sequence TTCN PAM
gucucaagaugagcuggauu

SEQ ID NO: 30739 - RNA, 20 nt, Artificial Sequence
  HTT spacer sequence TTCN PAM
caugugagcuuuggcucauc

SEQ ID NO: 30740 - RNA, 20 nt, Artificial Sequence
  HTT spacer sequence TTCN PAM
acaaaugcuuagugauaccu

SEQ ID NO: 30741 - RNA, 20 nt, Artificial Sequence
  HTT spacer sequence TTCN PAM
uucaacaaaugcuuagugau

SEQ ID NO: 30742 - RNA, 20 nt, Artificial Sequence
  HTT spacer sequence TTCN PAM
caccucagcccccugaguag

SEQ ID NO: 30743 - RNA, 20 nt, Artificial Sequence
  HTT spacer sequence TTCN PAM
aauauggggaauuuucaguu

SEQ ID NO: 30744 - RNA, 20 nt, Artificial Sequence
  HTT spacer sequence TTCN PAM
ccauauuagaaugccucaag

SEQ ID NO: 30745 - RNA, 20 nt, Artificial Sequence
  HTT spacer sequence TTCN PAM
guuuuugaaacacuuaaaaa

SEQ ID NO: 30746 - RNA, 20 nt, Artificial Sequence
  HTT spacer sequence TTCN PAM
aaaacugaaaauuccccaua

SEQ ID NO: 30747 - RNA, 20 nt, Artificial Sequence
  HTT spacer sequence TTCN PAM
cuuaccauuaacauauuuuu

SEQ ID NO: 30748 - RNA, 20 nt, Artificial Sequence
  HTT spacer sequence TTCN PAM
uuaaggacuguuugcuuucc

SEQ ID NO: 30749 - RNA, 20 nt, Artificial Sequence
  HTT spacer sequence TTCN PAM
uuccuacugggcugcauauu

SEQ ID NO: 30750 - RNA, 20 nt, Artificial Sequence
  HTT spacer sequence TTCN PAM
uacugggcugcauauuuaau

SEQ ID NO: 30751 - RNA, 20 nt, Artificial Sequence
  HTT spacer sequence TTCN PAM
gugauuaaauaugcagccca

SEQ ID NO: 30752 - RNA, 20 nt, Artificial Sequence
  HTT spacer sequence TTCN PAM
aaucuguauaacuaugcaaa

SEQ ID NO: 30753 - RNA, 20 nt, Artificial Sequence
  HTT spacer sequence TTCN PAM
uugcauaguuauacagauuu

SEQ ID NO: 30754 - RNA, 20 nt, Artificial Sequence
  HTT spacer sequence TTCN PAM
uuuuacacugucgucacaug

SEQ ID NO: 30755 - RNA, 20 nt, Artificial Sequence
  HTT spacer sequence TTCN PAM
ucucagcaaacaacucacau

SEQ ID NO: 30756 - RNA, 20 nt, Artificial Sequence
  HTT spacer sequence TTCN PAM
uguccugccuguuugccgug

SEQ ID NO: 30757 - RNA, 20 nt, Artificial Sequence
  HTT spacer sequence TTCN PAM
ugagccacggcaaacaggca

SEQ ID NO: 30758 - RNA, 20 nt, Artificial Sequence
  HTT spacer sequence TTCN PAM
uguuuugccgcgcuagcccu

SEQ ID NO: 30759 - RNA, 20 nt, Artificial Sequence
  HTT spacer sequence TTCN PAM
uacuggguacucaggaauca

SEQ ID NO: 30760 - RNA, 20 nt, Artificial Sequence
  HTT spacer sequence TTCN PAM
ugaguacccaguaggaacaa

SEQ ID NO: 30761 - RNA, 20 nt, Artificial Sequence
  HTT spacer sequence TTCN PAM
gaauaauugggccuuuuguu

SEQ ID NO: 30762 - RNA, 20 nt, Artificial Sequence
  HTT spacer sequence TTCN PAM
gaaguuggcacugugauucc

SEQ ID NO: 30763 - RNA, 20 nt, Artificial Sequence
  HTT spacer sequence TTCN PAM
uguagagacuugaagccuga

SEQ ID NO: 30764 - RNA, 20 nt, Artificial Sequence
  HTT spacer sequence TTCN PAM
agucucuacaagaaacaaca

SEQ ID NO: 30765 - RNA, 20 nt, Artificial Sequence
  HTT spacer sequence TTCN PAM
caggcuucaagucucuacaa

SEQ ID NO: 30766 - RNA, 20 nt, Artificial Sequence
  HTT spacer sequence TTCN PAM
ccuugaugaucgugguaagu

SEQ ID NO: 30767 - RNA, 20 nt, Artificial Sequence
  HTT spacer sequence TTCN PAM
caucuaauggguagacuuug

SEQ ID NO: 30768 - RNA, 20 nt, Artificial Sequence
  HTT spacer sequence TTCN PAM
guauccaagucccucuaaca

SEQ ID NO: 30769 - RNA, 20 nt, Artificial Sequence
  HTT spacer sequence TTCN PAM
gcauccaacuuucuguaucc

SEQ ID NO: 30770 - RNA, 20 nt, Artificial Sequence
  HTT spacer sequence TTCN PAM
cuccuaaucauuaaguccac

SEQ ID NO: 30771 - RNA, 20 nt, Artificial Sequence
  HTT spacer sequence TTCN PAM
auucucuccuaaucauuaag

SEQ ID NO: 30772 - RNA, 20 nt, Artificial Sequence
  HTT spacer sequence TTCN PAM
uuuuguuauuguuuccauuc

SEQ ID NO: 30773 - RNA, 20 nt, Artificial Sequence
  HTT spacer sequence TTCN PAM
uuuuaaaaagaugaaauacu

SEQ ID NO: 30774 - RNA, 20 nt, Artificial Sequence
  HTT spacer sequence TTCN PAM
ucuuuuuaaaaugaacacau

SEQ ID NO: 30775 - RNA, 20 nt, Artificial Sequence
  HTT spacer sequence TTCN PAM
ccuguguuuaggcaagaagc

SEQ ID NO: 30776 - RNA, 20 nt, Artificial Sequence
  HTT spacer sequence TTCN PAM
ugccuaaacacaggggaaug

SEQ ID NO: 30777 - RNA, 20 nt, Artificial Sequence
  HTT spacer sequence TTCN PAM
auuaaugauugaguuuuaga

SEQ ID NO: 30778 - RNA, 20 nt, Artificial Sequence
  HTT spacer sequence TTCN PAM
aaaacucaaucauuaauuga

SEQ ID NO: 30779 - RNA, 20 nt, Artificial Sequence
  HTT spacer sequence TTCN PAM
aggcugcagugagcuaugau

SEQ ID NO: 30780 - RNA, 20 nt, Artificial Sequence
  HTT spacer sequence TTCN PAM
gcauagcugggacuacagcu

SEQ ID NO: 30781 - RNA, 20 nt, Artificial Sequence
  HTT spacer sequence TTCN PAM
caaacuacugcccucaagca

SEQ ID NO: 30782 - RNA, 20 nt, Artificial Sequence
  HTT spacer sequence TTCN PAM
cucccaaagcacuaggguua

SEQ ID NO: 30783 - RNA, 20 nt, Artificial Sequence
  HTT spacer sequence TTCN PAM
agguggggcacaguggcuua

SEQ ID NO: 30784 - RNA, 20 nt, Artificial Sequence
  HTT spacer sequence TTCN PAM
gacuuuguguuuacuuuaau

SEQ ID NO: 30785 - RNA, 20 nt, Artificial Sequence
  HTT spacer sequence TTCN PAM
cccucuuguuucuugcuguu

SEQ ID NO: 30786 - RNA, 20 nt, Artificial Sequence
  HTT spacer sequence TTCN PAM
ugcuguugacccaccucuug

SEQ ID NO: 30787 - RNA, 20 nt, Artificial Sequence
  HTT spacer sequence TTCN PAM
uuuuuauuuccauuccccuc

SEQ ID NO: 30788 - RNA, 20 nt, Artificial Sequence
  HTT spacer sequence TTCN PAM
auuccccucuaaacuuuguc

SEQ ID NO: 30789 - RNA, 20 nt, Artificial Sequence
  HTT spacer sequence TTCN PAM
ccucuaaacuuugucauguu

SEQ ID NO: 30790 - RNA, 20 nt, Artificial Sequence
  HTT spacer sequence TTCN PAM
gcaggcuccuugucugcagc

SEQ ID NO: 30791 - RNA, 20 nt, Artificial Sequence
  HTT spacer sequence TTCN PAM
ucuaagggagagucauaccc

SEQ ID NO: 30792 - RNA, 20 nt, Artificial Sequence
  HTT spacer sequence TTCN PAM
ggguaugacucucccuuaga

SEQ ID NO: 30793 - RNA, 20 nt, Artificial Sequence
  HTT spacer sequence TTCN PAM
uucaagugaguuuucuuggc

SEQ ID NO: 30794 - RNA, 20 nt, Artificial Sequence
  HTT spacer sequence TTCN PAM
agugaguuuucuuggcaaag

SEQ ID NO: 30795 - RNA, 20 nt, Artificial Sequence
  HTT spacer sequence TTCN PAM
uggcaaagaagggucuuaca

SEQ ID NO: 30796 - RNA, 20 nt, Artificial Sequence
  HTT spacer sequence TTCN PAM
uugccaagaaaacucacuug

SEQ ID NO: 30797 - RNA, 20 nt, Artificial Sequence
  HTT spacer sequence TTCN PAM
cggcaggagccacugaccuu

SEQ ID NO: 30798 - RNA, 20 nt, Artificial Sequence
  HTT spacer sequence TTCN PAM
aagucccccacgacugcccu

SEQ ID NO: 30799 - RNA, 20 nt, Artificial Sequence
  HTT spacer sequence TTCN PAM
ugcuuaucuaauucauguau

SEQ ID NO: 30800 - RNA, 20 nt, Artificial Sequence
  HTT spacer sequence TTCN PAM
uguaugacacccugcccugu

SEQ ID NO: 30801 - RNA, 20 nt, Artificial Sequence
  HTT spacer sequence TTCN PAM
ucacagggcagggugucaua

SEQ ID NO: 30802 - RNA, 20 nt, Artificial Sequence
  HTT spacer sequence TTCN PAM
aguacccuccuuccucacag

SEQ ID NO: 30803 - RNA, 20 nt, Artificial Sequence
  HTT spacer sequence TTCN PAM
cauuuaauggaaggcgauac

SEQ ID NO: 30804 - RNA, 20 nt, Artificial Sequence
  HTT spacer sequence TTCN PAM
auuaaaugagaauuccagua

SEQ ID NO: 30805 - RNA, 20 nt, Artificial Sequence
  HTT spacer sequence TTCN PAM
uaaaucuugguaucgccuuc

SEQ ID NO: 30806 - RNA, 20 nt, Artificial Sequence
  HTT spacer sequence TTCN PAM
uuccuggugcugugcugcuc

SEQ ID NO: 30807 - RNA, 20 nt, Artificial Sequence
  HTT spacer sequence TTCN PAM
uggugcugugcugcucacca

SEQ ID NO: 30808 - RNA, 20 nt, Artificial Sequence
  HTT spacer sequence TTCN PAM
cuuagugcccuccccaccca

SEQ ID NO: 30809 - RNA, 20 nt, Artificial Sequence
  HTT spacer sequence TTCN PAM
accuacccuuguuaagccuu

SEQ ID NO: 30810 - RNA, 20 nt, Artificial Sequence
  HTT spacer sequence TTCN PAM
gaucaaccacauagcuugga

SEQ ID NO: 30811 - RNA, 20 nt, Artificial Sequence
  HTT spacer sequence TTCN PAM
cugcuuuguuuacacaaaag

SEQ ID NO: 30812 - RNA, 20 nt, Artificial Sequence
  HTT spacer sequence TTCN PAM
uuauguuuaugagcaagcac

SEQ ID NO: 30813 - RNA, 20 nt, Artificial Sequence
  HTT spacer sequence TTCN PAM
caugauugucccuuuauguu

SEQ ID NO: 30814 - RNA, 20 nt, Artificial Sequence
  HTT spacer sequence TTCN PAM
aaccauuucucaugauuguc

SEQ ID NO: 30815 - RNA, 20 nt, Artificial Sequence
  HTT spacer sequence TTCN PAM
guguuuuuaggagauuuuuc

SEQ ID NO: 30816 - RNA, 20 nt, Artificial Sequence
  HTT spacer sequence TTCN PAM
guguaguucucucuucuuua

SEQ ID NO: 30817 - RNA, 20 nt, Artificial Sequence
  HTT spacer sequence TTCN PAM
cucuucuuuagaacuuuacc

SEQ ID NO: 30818 - RNA, 20 nt, Artificial Sequence
  HTT spacer sequence TTCN PAM
uuagaacuuuaccccacaug

SEQ ID NO: 30819 - RNA, 20 nt, Artificial Sequence
  HTT spacer sequence TTCN PAM
aaagaagagagaacuacaca

SEQ ID NO: 30820 - RNA, 20 nt, Artificial Sequence
  HTT spacer sequence TTCN PAM
ccagugcuaacuccugccug

SEQ ID NO: 30821 - RNA, 20 nt, Artificial Sequence
  HTT spacer sequence TTCN PAM
ccuccugcgccacgaucuga

SEQ ID NO: 30822 - RNA, 20 nt, Artificial Sequence
  HTT spacer sequence TTCN PAM
gaucguggcgcaggagggga

SEQ ID NO: 30823 - RNA, 20 nt, Artificial Sequence
  HTT spacer sequence TTCN PAM
cugucucuucucuuggggac

SEQ ID NO: 30824 - RNA, 20 nt, Artificial Sequence
  HTT spacer sequence TTCN PAM
cuuggggaccacaguccucu

SEQ ID NO: 30825 - RNA, 20 nt, Artificial Sequence
  HTT spacer sequence TTCN PAM
uuuuuuuaaaguucuuuuua

SEQ ID NO: 30826 - RNA, 20 nt, Artificial Sequence
  HTT spacer sequence TTCN PAM
uuuuaaggucagggucucuc

SEQ ID NO: 30827 - RNA, 20 nt, Artificial Sequence
  HTT spacer sequence TTCN PAM
gguuguaauugugccacaau

SEQ ID NO: 30828 - RNA, 20 nt, Artificial Sequence
  HTT spacer sequence TTCN PAM
ggcaugcaccaccacaucca

SEQ ID NO: 30829 - RNA, 20 nt, Artificial Sequence
  HTT spacer sequence TTCN PAM
cagcuacucaggaggcugag

SEQ ID NO: 30830 - RNA, 20 nt, Artificial Sequence
  HTT spacer sequence TTCN PAM
agaccagccuggccaacaug

SEQ ID NO: 30831 - RNA, 20 nt, Artificial Sequence
  HTT spacer sequence TTCN PAM
ccauguuggccaggcugguc

SEQ ID NO: 30832 - RNA, 20 nt, Artificial Sequence
  HTT spacer sequence TTCN PAM
ccugccucggccuccugagu

SEQ ID NO: 30833 - RNA, 20 nt, Artificial Sequence
  HTT spacer sequence TTCN PAM
agcgauucuccugccucggc

SEQ ID NO: 30834 - RNA, 20 nt, Artificial Sequence
  HTT spacer sequence TTCN PAM
uugcaguucuuuuagucauu

SEQ ID NO: 30835 - RNA, 20 nt, Artificial Sequence
  HTT spacer sequence TTCN PAM
uuuagucauuagcaaaaguu

SEQ ID NO: 30836 - RNA, 20 nt, Artificial Sequence
  HTT spacer sequence TTCN PAM
uugguucuaggguuguucac

SEQ ID NO: 30837 - RNA, 20 nt, Artificial Sequence
  HTT spacer sequence TTCN PAM
aggguuguucacucaaauua

SEQ ID NO: 30838 - RNA, 20 nt, Artificial Sequence
  HTT spacer sequence TTCN PAM
cucaaauuaauuuaaaguca

SEQ ID NO: 30839 - RNA, 20 nt, Artificial Sequence
  HTT spacer sequence TTCN PAM
ggugauccaccugccuuggc

SEQ ID NO: 30840 - RNA, 20 nt, Artificial Sequence
  HTT spacer sequence TTCN PAM
agaccagccuggccaacaug

SEQ ID NO: 30841 - RNA, 20 nt, Artificial Sequence
  HTT spacer sequence TTCN PAM
ccauguuggccaggcugguc

SEQ ID NO: 30842 - RNA, 20 nt, Artificial Sequence
  HTT spacer sequence TTCN PAM
gccucagccccucaaguagc

SEQ ID NO: 30843 - RNA, 20 nt, Artificial Sequence
  HTT spacer sequence TTCN PAM
ucugccucagccccucaagu

SEQ ID NO: 30844 - RNA, 20 nt, Artificial Sequence
  HTT spacer sequence TTCN PAM
agcgauucuucugccucagc

SEQ ID NO: 30845 - RNA, 20 nt, Artificial Sequence
  HTT spacer sequence TTCN PAM
gcucacugcaaccuccgccu

SEQ ID NO: 30846 - RNA, 20 nt, Artificial Sequence
  HTT spacer sequence TTCN PAM
cuucugugcgguuaaaccac

SEQ ID NO: 30847 - RNA, 20 nt, Artificial Sequence
  HTT spacer sequence TTCN PAM
gugcgguuaaaccaccagcu

SEQ ID NO: 30848 - RNA, 20 nt, Artificial Sequence
  HTT spacer sequence TTCN PAM
uuuucuuaauuuugcuuuca

SEQ ID NO: 30849 - RNA, 20 nt, Artificial Sequence
  HTT spacer sequence TTCN PAM
uaauuuugcuuucaauuuuu

SEQ ID NO: 30850 - RNA, 20 nt, Artificial Sequence
  HTT spacer sequence TTCN PAM
auuuuuagcgaucuaauuuu

SEQ ID NO: 30851 - RNA, 20 nt, Artificial Sequence
  HTT spacer sequence TTCN PAM
ugccauucuccugccucagc

SEQ ID NO: 30852 - RNA, 20 nt, Artificial Sequence
  HTT spacer sequence TTCN PAM
ccugccucagccucccaagc

SEQ ID NO: 30853 - RNA, 20 nt, Artificial Sequence
  HTT spacer sequence TTCN PAM
ccguguuagccaggaugguc

SEQ ID NO: 30854 - RNA, 20 nt, Artificial Sequence
  HTT spacer sequence TTCN PAM
aaagauaacaccgcaaaaua

SEQ ID NO: 30855 - RNA, 20 nt, Artificial Sequence
  HTT spacer sequence TTCN PAM
aucccugaccauccccaagu

SEQ ID NO: 30856 - RNA, 20 nt, Artificial Sequence
  HTT spacer sequence TTCN PAM
uuccuucauuuacauacuau

SEQ ID NO: 30857 - RNA, 20 nt, Artificial Sequence
  HTT spacer sequence TTCN PAM
uucauuuacauacuauauau

SEQ ID NO: 30858 - RNA, 20 nt, Artificial Sequence
  HTT spacer sequence TTCN PAM
uuuacauacuauauauguau

SEQ ID NO: 30859 - RNA, 20 nt, Artificial Sequence
  HTT spacer sequence TTCN PAM
ccacucauuucuuaaauaaa

SEQ ID NO: 30860 - RNA, 20 nt, Artificial Sequence
  HTT spacer sequence TTCN PAM
uaaauaaaguaguagaccac

SEQ ID NO: 30861 - RNA, 20 nt, Artificial Sequence
  HTT spacer sequence TTCN PAM
cugaauauacgguggagaug

SEQ ID NO: 30862 - RNA, 20 nt, Artificial Sequence
  HTT spacer sequence TTCN PAM
gugaaauagccacguggagg

SEQ ID NO: 30863 - RNA, 20 nt, Artificial Sequence
  HTT spacer sequence TTCN PAM
guccgucugcugugccuccu

SEQ ID NO: 30864 - RNA, 20 nt, Artificial Sequence
  HTT spacer sequence TTCN PAM
ccugcaggaggcacagcaga

SEQ ID NO: 30865 - RNA, 20 nt, Artificial Sequence
  HTT spacer sequence TTCN PAM
guuggugccgcgauggagag

SEQ ID NO: 30866 - RNA, 20 nt, Artificial Sequence
  HTT spacer sequence TTCN PAM
uauuucguugaauguauccu

SEQ ID NO: 30867 - RNA, 20 nt, Artificial Sequence
  HTT spacer sequence TTCN PAM
uugaauguauccuugauaga

SEQ ID NO: 30868 - RNA, 20 nt, Artificial Sequence
  HTT spacer sequence TTCN PAM
acgaaauaggaaauuacaug

SEQ ID NO: 30869 - RNA, 20 nt, Artificial Sequence
  HTT spacer sequence TTCN PAM
aggacucuaucaaggauaca

SEQ ID NO: 30870 - RNA, 20 nt, Artificial Sequence
  HTT spacer sequence TTCN PAM
cccacuucuaggacucuauc

SEQ ID NO: 30871 - RNA, 20 nt, Artificial Sequence
  HTT spacer sequence TTCN PAM
uacgcaauuugucagauauu

SEQ ID NO: 30872 - RNA, 20 nt, Artificial Sequence
  HTT spacer sequence TTCN PAM
gcuccaggguguuucccguc

SEQ ID NO: 30873 - RNA, 20 nt, Artificial Sequence
  HTT spacer sequence TTCN PAM
cgucugcauucccaccagca

SEQ ID NO: 30874 - RNA, 20 nt, Artificial Sequence
  HTT spacer sequence TTCN PAM
caccagcagugcacgagagc

SEQ ID NO: 30875 - RNA, 20 nt, Artificial Sequence
  HTT spacer sequence TTCN PAM
ccacagccucgccagcagac

SEQ ID NO: 30876 - RNA, 20 nt, Artificial Sequence
  HTT spacer sequence TTCN PAM
cgaacuuuggaguuuuuguc

SEQ ID NO: 30877 - RNA, 20 nt, Artificial Sequence
  HTT spacer sequence TTCN PAM
agaacucggucugcuggcga

SEQ ID NO: 30878 - RNA, 20 nt, Artificial Sequence
  HTT spacer sequence TTCN PAM
cagcuaacaaacugacaaaa

SEQ ID NO: 30879 - RNA, 20 nt, Artificial Sequence
  HTT spacer sequence TTCN PAM
guguaguuuuaaguugcauu

SEQ ID NO: 30880 - RNA, 20 nt, Artificial Sequence
  HTT spacer sequence TTCN PAM
caguuuaaaaauccauuuuu

SEQ ID NO: 30881 - RNA, 20 nt, Artificial Sequence
  HTT spacer sequence TTCN PAM
uauaaaaauggauuuuuaaa

SEQ ID NO: 30882 - RNA, 20 nt, Artificial Sequence
  HTT spacer sequence TTCN PAM
uaucauugucuuauuuuucu

SEQ ID NO: 30883 - RNA, 20 nt, Artificial Sequence
  HTT spacer sequence TTCN PAM
uuuaaguagagugcuaacau

SEQ ID NO: 30884 - RNA, 20 nt, Artificial Sequence
  HTT spacer sequence TTCN PAM
uguauuuuucauuuaaguag

SEQ ID NO: 30885 - RNA, 20 nt, Artificial Sequence
  HTT spacer sequence TTCN PAM
agaccagccugggcaacaug

SEQ ID NO: 30886 - RNA, 20 nt, Artificial Sequence
  HTT spacer sequence TTCN PAM
uuuguagagacaggguuugg

SEQ ID NO: 30887 - RNA, 20 nt, Artificial Sequence
  HTT spacer sequence TTCN PAM
uuucuuuuguagagacaggg

SEQ ID NO: 30888 - RNA, 20 nt, Artificial Sequence
  HTT spacer sequence TTCN PAM
uuucuuuucuuuuguagaga

SEQ ID NO: 30889 - RNA, 20 nt, Artificial Sequence
  HTT spacer sequence TTCN PAM
uuuucuuuucuuuucuuuug

SEQ ID NO: 30890 - RNA, 20 nt, Artificial Sequence
  HTT spacer sequence TTCN PAM
auaauccacauuucauuuuc

SEQ ID NO: 30891 - RNA, 20 nt, Artificial Sequence
  HTT spacer sequence TTCN PAM
uucaauaauccacauuucau

SEQ ID NO: 30892 - RNA, 20 nt, Artificial Sequence
  HTT spacer sequence TTCN PAM
uccccuuguacagaugcauu

SEQ ID NO: 30893 - RNA, 20 nt, Artificial Sequence
  HTT spacer sequence TTCN PAM
ucucuaaagcaucaugcaga

SEQ ID NO: 30894 - RNA, 20 nt, Artificial Sequence
  HTT spacer sequence TTCN PAM
uucauuucaccaauaaauau

SEQ ID NO: 30895 - RNA, 20 nt, Artificial Sequence
  HTT spacer sequence TTCN PAM
uuucaccaauaaauauuuau

SEQ ID NO: 30896 - RNA, 20 nt, Artificial Sequence
  HTT spacer sequence TTCN PAM
ccaauaaauauuuauugagc

SEQ ID NO: 30897 - RNA, 20 nt, Artificial Sequence
  HTT spacer sequence TTCN PAM
aauaucauacccuggccuac

SEQ ID NO: 30898 - RNA, 20 nt, Artificial Sequence
  HTT spacer sequence TTCN PAM
ccacuuauccucagcuucua

SEQ ID NO: 30899 - RNA, 20 nt, Artificial Sequence
  HTT spacer sequence TTCN PAM
acuuauucaccacuuauccu

SEQ ID NO: 30900 - RNA, 20 nt, Artificial Sequence
  HTT spacer sequence TTCN PAM
agggcuggcuaaucuuucua

SEQ ID NO: 30901 - RNA, 20 nt, Artificial Sequence
  HTT spacer sequence TTCN PAM
acacacucaacagaauguuu

SEQ ID NO: 30902 - RNA, 20 nt, Artificial Sequence
  HTT spacer sequence TTCN PAM
guugaguguguagaaagauu

SEQ ID NO: 30903 - RNA, 20 nt, Artificial Sequence
  HTT spacer sequence TTCN PAM
auaauuucguauuuucuuua

SEQ ID NO: 30904 - RNA, 20 nt, Artificial Sequence
  HTT spacer sequence TTCN PAM
uauuuucuuuauaauuuuuu

SEQ ID NO: 30905 - RNA, 20 nt, Artificial Sequence
  HTT spacer sequence TTCN PAM
uuauaauuuuuuugagacag

SEQ ID NO: 30906 - RNA, 20 nt, Artificial Sequence
  HTT spacer sequence TTCN PAM
cacucuugcccugcaguggu

SEQ ID NO: 30907 - RNA, 20 nt, Artificial Sequence
  HTT spacer sequence TTCN PAM
ccgcagccucgaccuucugg

SEQ ID NO: 30908 - RNA, 20 nt, Artificial Sequence
  HTT spacer sequence TTCN PAM
gggcuuaagcgauccuccug

SEQ ID NO: 30909 - RNA, 20 nt, Artificial Sequence
  HTT spacer sequence TTCN PAM
caggcuggucucaaaaugug

SEQ ID NO: 30910 - RNA, 20 nt, Artificial Sequence
  HTT spacer sequence TTCN PAM
acauuuugagaccagccugg

SEQ ID NO: 30911 - RNA, 20 nt, Artificial Sequence
  HTT spacer sequence TTCN PAM
agcacuuugggaggccaagg

SEQ ID NO: 30912 - RNA, 20 nt, Artificial Sequence
  HTT spacer sequence TTCN PAM
caccuguaauuccagcacuu

SEQ ID NO: 30913 - RNA, 20 nt, Artificial Sequence
  HTT spacer sequence TTCN PAM
auaggaauucaacaaauauu

SEQ ID NO: 30914 - RNA, 20 nt, Artificial Sequence
  HTT spacer sequence TTCN PAM
uauggaacuaacaaauuagg

SEQ ID NO: 30915 - RNA, 20 nt, Artificial Sequence
  HTT spacer sequence TTCN PAM
acaaauauuuaaauccuucu

SEQ ID NO: 30916 - RNA, 20 nt, Artificial Sequence
  HTT spacer sequence TTCN PAM
auauucaacgcauuaacaca

SEQ ID NO: 30917 - RNA, 20 nt, Artificial Sequence
  HTT spacer sequence TTCN PAM
acgcauuaacacauaauaua

SEQ ID NO: 30918 - RNA, 20 nt, Artificial Sequence
  HTT spacer sequence TTCN PAM
cuaaguaccuuaauuuuguu

SEQ ID NO: 30919 - RNA, 20 nt, Artificial Sequence
  HTT spacer sequence TTCN PAM
cugacucuauuaccauuugu

SEQ ID NO: 30920 - RNA, 20 nt, Artificial Sequence
  HTT spacer sequence TTCN PAM
caagagaauaacuccauauc

SEQ ID NO: 30921 - RNA, 20 nt, Artificial Sequence
  HTT spacer sequence TTCN PAM
cuugagaacaaaugguaaua

SEQ ID NO: 30922 - RNA, 20 nt, Artificial Sequence
  HTT spacer sequence TTCN PAM
uguguagcugucccugugua

SEQ ID NO: 30923 - RNA, 20 nt, Artificial Sequence
  HTT spacer sequence TTCN PAM
gucagaguaccaguacuaua

SEQ ID NO: 30924 - RNA, 20 nt, Artificial Sequence
  HTT spacer sequence TTCN PAM
guaguugauauaauauucau

SEQ ID NO: 30925 - RNA, 20 nt, Artificial Sequence
  HTT spacer sequence TTCN PAM
uuauauuuuuauugauguac

SEQ ID NO: 30926 - RNA, 20 nt, Artificial Sequence
  HTT spacer sequence TTCN PAM
agguacaucaauaaaaauau

SEQ ID NO: 30927 - RNA, 20 nt, Artificial Sequence
  HTT spacer sequence TTCN PAM
gucuuaucaagugguggccu

SEQ ID NO: 30928 - RNA, 20 nt, Artificial Sequence
  HTT spacer sequence TTCN PAM
ugaucaauagccaggcaaaa

SEQ ID NO: 30929 - RNA, 20 nt, Artificial Sequence
  HTT spacer sequence TTCN PAM
auuuuugccuggcuauugau

SEQ ID NO: 30930 - RNA, 20 nt, Artificial Sequence
  HTT spacer sequence TTCN PAM
ugcugcuagugaaaaugcau

SEQ ID NO: 30931 - RNA, 20 nt, Artificial Sequence
  HTT spacer sequence TTCN PAM
cuagcagcaggaaaauucga

SEQ ID NO: 30932 - RNA, 20 nt, Artificial Sequence
  HTT spacer sequence TTCN PAM
auacaaugcauuuucacuag

SEQ ID NO: 30933 - RNA, 20 nt, Artificial Sequence
  HTT spacer sequence TTCN PAM
uguuuaguaaaauuccauac

SEQ ID NO: 30934 - RNA, 20 nt, Artificial Sequence
  HTT spacer sequence TTCN PAM
agaguaugaaaugcuauuau

SEQ ID NO: 30935 - RNA, 20 nt, Artificial Sequence
  HTT spacer sequence TTCN PAM
uacucuggaacaguaaacgu

SEQ ID NO: 30936 - RNA, 20 nt, Artificial Sequence
  HTT spacer sequence TTCN PAM
agccaugguuuuugaggggc

SEQ ID NO: 30937 - RNA, 20 nt, Artificial Sequence
  HTT spacer sequence TTCN PAM
cauuuuaauuguuguuacgg

SEQ ID NO: 30938 - RNA, 20 nt, Artificial Sequence
  HTT spacer sequence TTCN PAM
cccgugaccuguguaauaac

SEQ ID NO: 30939 - RNA, 20 nt, Artificial Sequence
  HTT spacer sequence TTCN PAM
aauauguuauuacacagguc

SEQ ID NO: 30940 - RNA, 20 nt, Artificial Sequence
  HTT spacer sequence TTCN PAM
gaccucgguuuggccacaga

SEQ ID NO: 30941 - RNA, 20 nt, Artificial Sequence
  HTT spacer sequence TTCN PAM
gggaucucuguggccaaacc

SEQ ID NO: 30942 - RNA, 20 nt, Artificial Sequence
  HTT spacer sequence TTCN PAM
aggaagaguuggaacagucg

SEQ ID NO: 30943 - RNA, 20 nt, Artificial Sequence
  HTT spacer sequence TTCN PAM
ucgaacccucuguccuucug

SEQ ID NO: 30944 - RNA, 20 nt, Artificial Sequence
  HTT spacer sequence TTCN PAM
aacucuuccucgaacccucu

SEQ ID NO: 30945 - RNA, 20 nt, Artificial Sequence
  HTT spacer sequence TTCN PAM
ugagaggcuuucggcguccu

SEQ ID NO: 30946 - RNA, 20 nt, Artificial Sequence
  HTT spacer sequence TTCN PAM
gcguccuuguccuuucuauc

SEQ ID NO: 30947 - RNA, 20 nt, Artificial Sequence
  HTT spacer sequence TTCN PAM
auccgggugccugagugccu

SEQ ID NO: 30948 - RNA, 20 nt, Artificial Sequence
  HTT spacer sequence TTCN PAM
gaggcacucaggcacccgga

SEQ ID NO: 30949 - RNA, 20 nt, Artificial Sequence
  HTT spacer sequence TTCN PAM
cuguguucugaggcacucag

SEQ ID NO: 30950 - RNA, 20 nt, Artificial Sequence
  HTT spacer sequence TTCN PAM
ggguggauuucucuguguuc

SEQ ID NO: 30951 - RNA, 20 nt, Artificial Sequence
  HTT spacer sequence TTCN PAM
aaacaccacugcgccaucua

SEQ ID NO: 30952 - RNA, 20 nt, Artificial Sequence
  HTT spacer sequence TTCN PAM
uacagaugaggggugaggcc

SEQ ID NO: 30953 - RNA, 20 nt, Artificial Sequence
  HTT spacer sequence TTCN PAM
cugagugaccucaggacuca

SEQ ID NO: 30954 - RNA, 20 nt, Artificial Sequence
  HTT spacer sequence TTCN PAM
gcccucacuucgcugaguga

SEQ ID NO: 30955 - RNA, 20 nt, Artificial Sequence
  HTT spacer sequence TTCN PAM
ugaggcuccgagaggccgug

SEQ ID NO: 30956 - RNA, 20 nt, Artificial Sequence
  HTT spacer sequence TTCN PAM
aaagauccgggggcagugcc

SEQ ID NO: 30957 - RNA, 20 nt, Artificial Sequence
  HTT spacer sequence TTCN PAM
ugcaggacucugcgaggcuc

SEQ ID NO: 30958 - RNA, 20 nt, Artificial Sequence
  HTT spacer sequence TTCN PAM
gcucuugcgucuuguggggu

SEQ ID NO: 30959 - RNA, 20 nt, Artificial Sequence
  HTT spacer sequence TTCN PAM
cugcccugggauagauggca

SEQ ID NO: 30960 - RNA, 20 nt, Artificial Sequence
  HTT spacer sequence TTCN PAM
ggagguggagccuucccuag

SEQ ID NO: 30961 - RNA, 20 nt, Artificial Sequence
  HTT spacer sequence TTCN PAM
cuagaccaccauuucccuug

SEQ ID NO: 30962 - RNA, 20 nt, Artificial Sequence
  HTT spacer sequence TTCN PAM
cuugugaaugugacucugug

SEQ ID NO: 30963 - RNA, 20 nt, Artificial Sequence
  HTT spacer sequence TTCN PAM
caagggaaaugguggucuag

SEQ ID NO: 30964 - RNA, 20 nt, Artificial Sequence
  HTT spacer sequence TTCN PAM
gcucaucuuggaugaaucau

SEQ ID NO: 30965 - RNA, 20 nt, Artificial Sequence
  HTT spacer sequence TTCN PAM
uccaagaugagcugaauugc

SEQ ID NO: 30966 - RNA, 20 nt, Artificial Sequence
  HTT spacer sequence TTCN PAM
uauaucaucaaguccaccag

SEQ ID NO: 30967 - RNA, 20 nt, Artificial Sequence
  HTT spacer sequence TTCN PAM
aacugguggacuugaugaua

SEQ ID NO: 30968 - RNA, 20 nt, Artificial Sequence
  HTT spacer sequence TTCN PAM
cagagucaugcaaccaucac

SEQ ID NO: 30969 - RNA, 20 nt, Artificial Sequence
  HTT spacer sequence TTCN PAM
caacuuuuuuuuuuuuuuga

SEQ ID NO: 30970 - RNA, 20 nt, Artificial Sequence
  HTT spacer sequence TTCN PAM
agccugggcgacugagugag

SEQ ID NO: 30971 - RNA, 20 nt, Artificial Sequence
  HTT spacer sequence TTCN PAM
ccugccucagcuuccugagu

SEQ ID NO: 30972 - RNA, 20 nt, Artificial Sequence
  HTT spacer sequence TTCN PAM
ugaguaucuggaacuacagg

SEQ ID NO: 30973 - RNA, 20 nt, Artificial Sequence
  HTT spacer sequence TTCN PAM
agauacucaggaagcugagg

SEQ ID NO: 30974 - RNA, 20 nt, Artificial Sequence
  HTT spacer sequence TTCN PAM
ccauguuguccaggcugguc

SEQ ID NO: 30975 - RNA, 20 nt, Artificial Sequence
  HTT spacer sequence TTCN PAM
ccucccaaaaugcugggauu

SEQ ID NO: 30976 - RNA, 20 nt, Artificial Sequence
  HTT spacer sequence TTCN PAM
uccauguugucacacacguu

SEQ ID NO: 30977 - RNA, 20 nt, Artificial Sequence
  HTT spacer sequence TTCN PAM
acgugugugacaacauggac

SEQ ID NO: 30978 - RNA, 20 nt, Artificial Sequence
  HTT spacer sequence TTCN PAM
caguaacacaguauacauuc

SEQ ID NO: 30979 - RNA, 20 nt, Artificial Sequence
  HTT spacer sequence TTCN PAM
uauaauucccaguaacacag

SEQ ID NO: 30980 - RNA, 20 nt, Artificial Sequence
  HTT spacer sequence TTCN PAM
auuuccuguauuuguuaugu

SEQ ID NO: 30981 - RNA, 20 nt, Artificial Sequence
  HTT spacer sequence TTCN PAM
uguauuuguuauguagcacc

SEQ ID NO: 30982 - RNA, 20 nt, Artificial Sequence
  HTT spacer sequence TTCN PAM
ggugcuacauaacaaauaca

SEQ ID NO: 30983 - RNA, 20 nt, Artificial Sequence
  HTT spacer sequence TTCN PAM
uuauugacaacuucaggugc

SEQ ID NO: 30984 - RNA, 20 nt, Artificial Sequence
  HTT spacer sequence TTCN PAM
uagaucagacagccaagucc

SEQ ID NO: 30985 - RNA, 20 nt, Artificial Sequence
  HTT spacer sequence TTCN PAM
gggacauucuccauucaaaa

SEQ ID NO: 30986 - RNA, 20 nt, Artificial Sequence
  HTT spacer sequence TTCN PAM
ccauucaaaaaauacaaaga

SEQ ID NO: 30987 - RNA, 20 nt, Artificial Sequence
  HTT spacer sequence TTCN PAM
aaaaauacaaagagaaaguc

SEQ ID NO: 30988 - RNA, 20 nt, Artificial Sequence
  HTT spacer sequence TTCN PAM
cuuuguauuuuuugaaugga

SEQ ID NO: 30989 - RNA, 20 nt, Artificial Sequence
  HTT spacer sequence TTCN PAM
uugaucgaccuccucccauu

SEQ ID NO: 30990 - RNA, 20 nt, Artificial Sequence
  HTT spacer sequence TTCN PAM
ugauucuuugaucgaccucc

SEQ ID NO: 30991 - RNA, 20 nt, Artificial Sequence
  HTT spacer sequence TTCN PAM
gagaaguuuucagaggaugc

SEQ ID NO: 30992 - RNA, 20 nt, Artificial Sequence
  HTT spacer sequence TTCN PAM
cagaauacuccucgguauca

SEQ ID NO: 30993 - RNA, 20 nt, Artificial Sequence
  HTT spacer sequence TTCN PAM
gaggaugccaaaucuaucug

SEQ ID NO: 30994 - RNA, 20 nt, Artificial Sequence
  HTT spacer sequence TTCN PAM
cagccucuacagagccugac

SEQ ID NO: 30995 - RNA, 20 nt, Artificial Sequence
  HTT spacer sequence TTCN PAM
cacucauucuaguuguuuuc

SEQ ID NO: 30996 - RNA, 20 nt, Artificial Sequence
  HTT spacer sequence TTCN PAM
aguuguuuucacuggcagcu

SEQ ID NO: 30997 - RNA, 20 nt, Artificial Sequence
  HTT spacer sequence TTCN PAM
cuggcagcuauaacaaaaaa

SEQ ID NO: 30998 - RNA, 20 nt, Artificial Sequence
  HTT spacer sequence TTCN PAM
gcaaguccuggucacccacc

SEQ ID NO: 30999 - RNA, 20 nt, Artificial Sequence
  HTT spacer sequence TTCN PAM
ggaggcucggguccaccugu

SEQ ID NO: 31000 - RNA, 20 nt, Artificial Sequence
  HTT spacer sequence TTCN PAM
ggaggcucagguccaccugu

SEQ ID NO: 31001 - RNA, 20 nt, Artificial Sequence
  HTT spacer sequence TTCN PAM
ggaggcucagguccaccugc

SEQ ID NO: 31002 - RNA, 20 nt, Artificial Sequence
  HTT spacer sequence TTCN PAM
uaagcaaacguguccucccu

SEQ ID NO: 31003 - RNA, 20 nt, Artificial Sequence
  HTT spacer sequence TTCN PAM
ccaugcuccugccacuggga

SEQ ID NO: 31004 - RNA, 20 nt, Artificial Sequence
  HTT spacer sequence TTCN PAM
ucagacaaaaagagccagug

SEQ ID NO: 31005 - RNA, 20 nt, Artificial Sequence
  HTT spacer sequence TTCN PAM
cacuggcucuuuuugucuga

SEQ ID NO: 31006 - RNA, 20 nt, Artificial Sequence
  HTT spacer sequence TTCN PAM
agacaugaucuggaaaugac

SEQ ID NO: 31007 - RNA, 20 nt, Artificial Sequence
  HTT spacer sequence TTCN PAM
agaucaugucuggaaacuuu

SEQ ID NO: 31008 - RNA, 20 nt, Artificial Sequence
  HTT spacer sequence TTCN PAM
ugguuugauuucucaaauaa

SEQ ID NO: 31009 - RNA, 20 nt, Artificial Sequence
  HTT spacer sequence TTCN PAM
caaauaaugcuacugaaagg

SEQ ID NO: 31010 - RNA, 20 nt, Artificial Sequence
  HTT spacer sequence TTCN PAM
guagcauuauuugagaaauc

SEQ ID NO: 31011 - RNA, 20 nt, Artificial Sequence
  HTT spacer sequence TTCN PAM
cuuucaguagcauuauuuga

SEQ ID NO: 31012 - RNA, 20 nt, Artificial Sequence
  HTT spacer sequence TTCN PAM
guuuucagaaaauagccaag

SEQ ID NO: 31013 - RNA, 20 nt, Artificial Sequence
  HTT spacer sequence TTCN PAM
gaaaauagccaagccuuguu

SEQ ID NO: 31014 - RNA, 20 nt, Artificial Sequence
  HTT spacer sequence TTCN PAM
gaaaacugaauuaauaaccu

SEQ ID NO: 31015 - RNA, 20 nt, Artificial Sequence
  HTT spacer sequence TTCN PAM
uugaccaauuuuauaugaag

SEQ ID NO: 31016 - RNA, 20 nt, Artificial Sequence
  HTT spacer sequence TTCN PAM
uauaaaauuggucaaugaaa

SEQ ID NO: 31017 - RNA, 20 nt, Artificial Sequence
  HTT spacer sequence TTCN PAM
uguauuuugagguggguaag

SEQ ID NO: 31018 - RNA, 20 nt, Artificial Sequence
  HTT spacer sequence TTCN PAM
gugugccuggcucugggccu

SEQ ID NO: 31019 - RNA, 20 nt, Artificial Sequence
  HTT spacer sequence TTCN PAM
uuaacugugcuaagggccuc

SEQ ID NO: 31020 - RNA, 20 nt, Artificial Sequence
  HTT spacer sequence TTCN PAM
gggaccagggaccaggucuc

SEQ ID NO: 31021 - RNA, 20 nt, Artificial Sequence
  HTT spacer sequence TTCN PAM
cucacugauugagugucugg

SEQ ID NO: 31022 - RNA, 20 nt, Artificial Sequence
  HTT spacer sequence TTCN PAM
uuuauuuucauucaacaagg

SEQ ID NO: 31023 - RNA, 20 nt, Artificial Sequence
  HTT spacer sequence TTCN PAM
uucaacaaggauuuauugag

SEQ ID NO: 31024 - RNA, 20 nt, Artificial Sequence
  HTT spacer sequence TTCN PAM
acaaggauuuauugagcauc

SEQ ID NO: 31025 - RNA, 20 nt, Artificial Sequence
  HTT spacer sequence TTCN PAM
aggcaccguccuaggcauug

SEQ ID NO: 31026 - RNA, 20 nt, Artificial Sequence
  HTT spacer sequence TTCN PAM
cccaaugccuaggacggugc

SEQ ID NO: 31027 - RNA, 20 nt, Artificial Sequence
  HTT spacer sequence TTCN PAM
auuugcugcuguuuccccca

SEQ ID NO: 31028 - RNA, 20 nt, Artificial Sequence
  HTT spacer sequence TTCN PAM
guucuauuugcugcuguuuc

SEQ ID NO: 31029 - RNA, 20 nt, Artificial Sequence
  HTT spacer sequence TTCN PAM
cgcuggcagggcggggacuu

SEQ ID NO: 31030 - RNA, 20 nt, Artificial Sequence
  HTT spacer sequence TTCN PAM
ugucaguucucgcuggcagg

SEQ ID NO: 31031 - RNA, 20 nt, Artificial Sequence
  HTT spacer sequence TTCN PAM
guuuccugucaguucucgcu

SEQ ID NO: 31032 - RNA, 20 nt, Artificial Sequence
  HTT spacer sequence TTCN PAM
ccguccuccagagugcgggu

SEQ ID NO: 31033 - RNA, 20 nt, Artificial Sequence
  HTT spacer sequence TTCN PAM
ugcucucugucccguccccc

SEQ ID NO: 31034 - RNA, 20 nt, Artificial Sequence
  HTT spacer sequence TTCN PAM
gcauggccugggcuuccugc

SEQ ID NO: 31035 - RNA, 20 nt, Artificial Sequence
  HTT spacer sequence TTCN PAM
ucugauggccaugaagccau

SEQ ID NO: 31036 - RNA, 20 nt, Artificial Sequence
  HTT spacer sequence TTCN PAM
uggccaucagaggaagcaac

SEQ ID NO: 31037 - RNA, 20 nt, Artificial Sequence
  HTT spacer sequence TTCN PAM
cagagcccugcgauggcuuc

SEQ ID NO: 31038 - RNA, 20 nt, Artificial Sequence
  HTT spacer sequence TTCN PAM
cucccaguggccggcaagcc

SEQ ID NO: 31039 - RNA, 20 nt, Artificial Sequence
  HTT spacer sequence TTCN PAM
uucucucccaguggccggca

SEQ ID NO: 31040 - RNA, 20 nt, Artificial Sequence
  HTT spacer sequence TTCN PAM
uccucccuguccauucauuc

SEQ ID NO: 31041 - RNA, 20 nt, Artificial Sequence
  HTT spacer sequence TTCN PAM
ggugagaguaaaggugacgc

SEQ ID NO: 31042 - RNA, 20 nt, Artificial Sequence
  HTT spacer sequence TTCN PAM
cacaccugcucugccaucac

SEQ ID NO: 31043 - RNA, 20 nt, Artificial Sequence
  HTT spacer sequence TTCN PAM
ggauggauccugaaggcagg

SEQ ID NO: 31044 - RNA, 20 nt, Artificial Sequence
  HTT spacer sequence TTCN PAM
ggauccauccugaaucugac

SEQ ID NO: 31045 - RNA, 20 nt, Artificial Sequence
  HTT spacer sequence TTCN PAM
ccaccaccugccuucaggau

SEQ ID NO: 31046 - RNA, 20 nt, Artificial Sequence
  HTT spacer sequence TTCN PAM
ggcugacuccaagaugggcu

SEQ ID NO: 31047 - RNA, 20 nt, Artificial Sequence
  HTT spacer sequence TTCN PAM
cuccagcccaucuuggaguc

SEQ ID NO: 31048 - RNA, 20 nt, Artificial Sequence
  HTT spacer sequence TTCN PAM
uccagugaccggagaggagg

SEQ ID NO: 31049 - RNA, 20 nt, Artificial Sequence
  HTT spacer sequence TTCN PAM
cagcccugcucacgucuccc

SEQ ID NO: 31050 - RNA, 20 nt, Artificial Sequence
  HTT spacer sequence TTCN PAM
uuuucucagauggucagccc

SEQ ID NO: 31051 - RNA, 20 nt, Artificial Sequence
  HTT spacer sequence TTCN PAM
cagauggucagccccuagug

SEQ ID NO: 31052 - RNA, 20 nt, Artificial Sequence
  HTT spacer sequence TTCN PAM
ucacaccugccucccaccuu

SEQ ID NO: 31053 - RNA, 20 nt, Artificial Sequence
  HTT spacer sequence TTCN PAM
agccuccccuuuccucacac

SEQ ID NO: 31054 - RNA, 20 nt, Artificial Sequence
  HTT spacer sequence TTCN PAM
aagccuucaagccuccccuu

SEQ ID NO: 31055 - RNA, 20 nt, Artificial Sequence
  HTT spacer sequence TTCN PAM
ucaacagcaucaagagccca

SEQ ID NO: 31056 - RNA, 20 nt, Artificial Sequence
  HTT spacer sequence TTCN PAM
gguccgcaugggcucuugau

SEQ ID NO: 31057 - RNA, 20 nt, Artificial Sequence
  HTT spacer sequence TTCN PAM
gccacaccuggacggugcag

SEQ ID NO: 31058 - RNA, 20 nt, Artificial Sequence
  HTT spacer sequence TTCN PAM
ucguccacuggagccagcgu

SEQ ID NO: 31059 - RNA, 20 nt, Artificial Sequence
  HTT spacer sequence TTCN PAM
cuguguccauuuccucgucc

SEQ ID NO: 31060 - RNA, 20 nt, Artificial Sequence
  HTT spacer sequence TTCN PAM
acaggaugggcaaagcaugg

SEQ ID NO: 31061 - RNA, 20 nt, Artificial Sequence
  HTT spacer sequence TTCN PAM
aacucuggccuggaggugua

SEQ ID NO: 31062 - RNA, 20 nt, Artificial Sequence
  HTT spacer sequence TTCN PAM
ucucugagcgucccucucau

SEQ ID NO: 31063 - RNA, 20 nt, Artificial Sequence
  HTT spacer sequence TTCN PAM
uccuccauccccccagugac

SEQ ID NO: 31064 - RNA, 20 nt, Artificial Sequence
  HTT spacer sequence TTCN PAM
ccagugacuucauccuccau

SEQ ID NO: 31065 - RNA, 20 nt, Artificial Sequence
  HTT spacer sequence TTCN PAM
cuucuccagugacuucaucc

SEQ ID NO: 31066 - RNA, 20 nt, Artificial Sequence
  HTT spacer sequence TTCN PAM
uagcagcugugccuggguaa

SEQ ID NO: 31067 - RNA, 20 nt, Artificial Sequence
  HTT spacer sequence TTCN PAM
gauguccuuuucauguguuu

SEQ ID NO: 31068 - RNA, 20 nt, Artificial Sequence
  HTT spacer sequence TTCN PAM
uguguuuccauauaugaagc

SEQ ID NO: 31069 - RNA, 20 nt, Artificial Sequence
  HTT spacer sequence TTCN PAM
auauaugaagccaugggugc

SEQ ID NO: 31070 - RNA, 20 nt, Artificial Sequence
  HTT spacer sequence TTCN PAM
uauauggaaacacaugaaaa

SEQ ID NO: 31071 - RNA, 20 nt, Artificial Sequence
  HTT spacer sequence TTCN PAM
cccggcuaccucacucugcu

SEQ ID NO: 31072 - RNA, 20 nt, Artificial Sequence
  HTT spacer sequence TTCN PAM
ucccacaggacacugacagg

SEQ ID NO: 31073 - RNA, 20 nt, Artificial Sequence
  HTT spacer sequence TTCN PAM
ugcagcccugucaguguccu

SEQ ID NO: 31074 - RNA, 20 nt, Artificial Sequence
  HTT spacer sequence TTCN PAM
gguacauauuuauacauucu

SEQ ID NO: 31075 - RNA, 20 nt, Artificial Sequence
  HTT spacer sequence TTCN PAM
guuuguuuuaggccuaacau

SEQ ID NO: 31076 - RNA, 20 nt, Artificial Sequence
  HTT spacer sequence TTCN PAM
cugcagucauuucuguuugu

SEQ ID NO: 31077 - RNA, 20 nt, Artificial Sequence
  HTT spacer sequence TTCN PAM
gcuuuuucacugcagucauu

SEQ ID NO: 31078 - RNA, 20 nt, Artificial Sequence
  HTT spacer sequence TTCN PAM
ccaucuuggccaggcugguc

SEQ ID NO: 31079 - RNA, 20 nt, Artificial Sequence
  HTT spacer sequence TTCN PAM
gaguaccugggauuacaggc

SEQ ID NO: 31080 - RNA, 20 nt, Artificial Sequence
  HTT spacer sequence TTCN PAM
uuuuugagacggagucaugc

SEQ ID NO: 31081 - RNA, 20 nt, Artificial Sequence
  HTT spacer sequence TTCN PAM
uuuuucuuuuuugagacgga

SEQ ID NO: 31082 - RNA, 20 nt, Artificial Sequence
  HTT spacer sequence TTCN PAM
uuucuuuuuucuuuuuugag

SEQ ID NO: 31083 - RNA, 20 nt, Artificial Sequence
  HTT spacer sequence TTCN PAM
gcuuuuucuuuucuuuuuuc

SEQ ID NO: 31084 - RNA, 20 nt, Artificial Sequence
  HTT spacer sequence TTCN PAM
gcuaggcucggggaggggaa

SEQ ID NO: 31085 - RNA, 20 nt, Artificial Sequence
  HTT spacer sequence TTCN PAM
ccuccccgagccuagcagaa

SEQ ID NO: 31086 - RNA, 20 nt, Artificial Sequence
  HTT spacer sequence TTCN PAM
uccccuccccgagccuagca

SEQ ID NO: 31087 - RNA, 20 nt, Artificial Sequence
  HTT spacer sequence TTCN PAM
auccacuuacgacacccauu

SEQ ID NO: 31088 - RNA, 20 nt, Artificial Sequence
  HTT spacer sequence TTCN PAM
agaugaaauccgugguguug

SEQ ID NO: 31089 - RNA, 20 nt, Artificial Sequence
  HTT spacer sequence TTCN PAM
ucuugaaagccccugagccu

SEQ ID NO: 31090 - RNA, 20 nt, Artificial Sequence
  HTT spacer sequence TTCN PAM
cagcaccuccaacaccacgg

SEQ ID NO: 31091 - RNA, 20 nt, Artificial Sequence
  HTT spacer sequence TTCN PAM
cacacagagcccucacucag

SEQ ID NO: 31092 - RNA, 20 nt, Artificial Sequence
  HTT spacer sequence TTCN PAM
aagcuagagcuucucacaca

SEQ ID NO: 31093 - RNA, 20 nt, Artificial Sequence
  HTT spacer sequence TTCN PAM
cauuuaugaaauguagauga

SEQ ID NO: 31094 - RNA, 20 nt, Artificial Sequence
  HTT spacer sequence TTCN PAM
uaaaugagaaacugagcugg

SEQ ID NO: 31095 - RNA, 20 nt, Artificial Sequence
  HTT spacer sequence TTCN PAM
uuuuauccucccaacaaucc

SEQ ID NO: 31096 - RNA, 20 nt, Artificial Sequence
  HTT spacer sequence TTCN PAM
ccucuuaguaauuauggagg

SEQ ID NO: 31097 - RNA, 20 nt, Artificial Sequence
  HTT spacer sequence TTCN PAM
uucuuaaagaauggguucua

SEQ ID NO: 31098 - RNA, 20 nt, Artificial Sequence
  HTT spacer sequence TTCN PAM
uaaagaauggguucuauggg

SEQ ID NO: 31099 - RNA, 20 nt, Artificial Sequence
  HTT spacer sequence TTCN PAM
uuaagaacgaacuguuucuc

SEQ ID NO: 31100 - RNA, 20 nt, Artificial Sequence
  HTT spacer sequence TTCN PAM
auggguuaacgacgucacac

SEQ ID NO: 31101 - RNA, 20 nt, Artificial Sequence
  HTT spacer sequence TTCN PAM
gucauagcagcccaaaggga

SEQ ID NO: 31102 - RNA, 20 nt, Artificial Sequence
  HTT spacer sequence TTCN PAM
gcuguugauaaauuacucag

SEQ ID NO: 31103 - RNA, 20 nt, Artificial Sequence
  HTT spacer sequence TTCN PAM
cagucaggaggcuggaaguc

SEQ ID NO: 31104 - RNA, 20 nt, Artificial Sequence
  HTT spacer sequence TTCN PAM
agccuccugacugagaaaau

SEQ ID NO: 31105 - RNA, 20 nt, Artificial Sequence
  HTT spacer sequence TTCN PAM
aagauggagccuuggcugga

SEQ ID NO: 31106 - RNA, 20 nt, Artificial Sequence
  HTT spacer sequence TTCN PAM
uuuaaaauauagacggcauc

SEQ ID NO: 31107 - RNA, 20 nt, Artificial Sequence
  HTT spacer sequence TTCN PAM
uucuuuuaaaauauagacgg

SEQ ID NO: 31108 - RNA, 20 nt, Artificial Sequence
  HTT spacer sequence TTCN PAM
uucuuucuuuuaaaauauag

SEQ ID NO: 31109 - RNA, 20 nt, Artificial Sequence
  HTT spacer sequence TTCN PAM
uucuuucuuucuuuuaaaau

SEQ ID NO: 31110 - RNA, 20 nt, Artificial Sequence
  HTT spacer sequence TTCN PAM
uuucuuucuuucuuucuuuu

SEQ ID NO: 31111 - RNA, 20 nt, Artificial Sequence
  HTT spacer sequence TTCN PAM
uuucuuuucuuucuuucuuu

SEQ ID NO: 31112 - RNA, 20 nt, Artificial Sequence
  HTT spacer sequence TTCN PAM
uucuuuucuuuucuuucuuu

SEQ ID NO: 31113 - RNA, 20 nt, Artificial Sequence
  HTT spacer sequence TTCN PAM
cacugcacccucacagggca

SEQ ID NO: 31114 - RNA, 20 nt, Artificial Sequence
  HTT spacer sequence TTCN PAM
aauggcaggaaucccauuca

SEQ ID NO: 31115 - RNA, 20 nt, Artificial Sequence
  HTT spacer sequence TTCN PAM
ugccauuagaaaaggggccc

SEQ ID NO: 31116 - RNA, 20 nt, Artificial Sequence
  HTT spacer sequence TTCN PAM
cgagggcagagccuucauga

SEQ ID NO: 31117 - RNA, 20 nt, Artificial Sequence
  HTT spacer sequence TTCN PAM
ugaccucaucaccuccagaa

SEQ ID NO: 31118 - RNA, 20 nt, Artificial Sequence
  HTT spacer sequence TTCN PAM
ggaggugaugaggucaugaa

SEQ ID NO: 31119 - RNA, 20 nt, Artificial Sequence
  HTT spacer sequence TTCN PAM
gcuuacagauuuguggggga

SEQ ID NO: 31120 - RNA, 20 nt, Artificial Sequence
  HTT spacer sequence TTCN PAM
gagcauccuggcccucgaug

SEQ ID NO: 31121 - RNA, 20 nt, Artificial Sequence
  HTT spacer sequence TTCN PAM
gcaucucagggacuccacag

SEQ ID NO: 31122 - RNA, 20 nt, Artificial Sequence
  HTT spacer sequence TTCN PAM
gaucuguuuuauuaauuuau

SEQ ID NO: 31123 - RNA, 20 nt, Artificial Sequence
  HTT spacer sequence TTCN PAM
uugagacggagucucaagaa

SEQ ID NO: 31124 - RNA, 20 nt, Artificial Sequence
  HTT spacer sequence TTCN PAM
ugagacuccgucucaaagaa

SEQ ID NO: 31125 - RNA, 20 nt, Artificial Sequence
  HTT spacer sequence TTCN PAM
agggauucuccugccucagg

SEQ ID NO: 31126 - RNA, 20 nt, Artificial Sequence
  HTT spacer sequence TTCN PAM
ccugccucaggcuccugagu

SEQ ID NO: 31127 - RNA, 20 nt, Artificial Sequence
  HTT spacer sequence TTCN PAM
ccauguuggccaggaugguc

SEQ ID NO: 31128 - RNA, 20 nt, Artificial Sequence
  HTT spacer sequence TTCN PAM
cauccguuuuaaauuaacaa

SEQ ID NO: 31129 - RNA, 20 nt, Artificial Sequence
  HTT spacer sequence TTCN PAM
uugcaugcuuuguuaauuua

SEQ ID NO: 31130 - RNA, 20 nt, Artificial Sequence
  HTT spacer sequence TTCN PAM
ggaagcuuugagucuagcag

SEQ ID NO: 31131 - RNA, 20 nt, Artificial Sequence
  HTT spacer sequence TTCN PAM
ugaagcuaaggcugugugac

SEQ ID NO: 31132 - RNA, 20 nt, Artificial Sequence
  HTT spacer sequence TTCN PAM
cagcaagaaauacuugucau

SEQ ID NO: 31133 - RNA, 20 nt, Artificial Sequence
  HTT spacer sequence TTCN PAM
ugcugagaaugagucauuug

SEQ ID NO: 31134 - RNA, 20 nt, Artificial Sequence
  HTT spacer sequence TTCN PAM
ggcccccauaccugcacuag

SEQ ID NO: 31135 - RNA, 20 nt, Artificial Sequence
  HTT spacer sequence TTCN PAM
gguuuuagcuuucuggcccc

SEQ ID NO: 31136 - RNA, 20 nt, Artificial Sequence
  HTT spacer sequence TTCN PAM
ucagguuuuagcuuucuggc

SEQ ID NO: 31137 - RNA, 20 nt, Artificial Sequence
  HTT spacer sequence TTCN PAM
gcuugcugacuccugcuaaa

SEQ ID NO: 31138 - RNA, 20 nt, Artificial Sequence
  HTT spacer sequence TTCN PAM
aucucccaccgcucucagcu

SEQ ID NO: 31139 - RNA, 20 nt, Artificial Sequence
  HTT spacer sequence TTCN PAM
ggucugcgcuucuaucuccc

SEQ ID NO: 31140 - RNA, 20 nt, Artificial Sequence
  HTT spacer sequence TTCN PAM
ggucuuugggacuuugaguu

SEQ ID NO: 31141 - RNA, 20 nt, Artificial Sequence
  HTT spacer sequence TTCN PAM
guaaggccagaugguaaaca

SEQ ID NO: 31142 - RNA, 20 nt, Artificial Sequence
  HTT spacer sequence TTCN PAM
acucugccgcuauaguggaa

SEQ ID NO: 31143 - RNA, 20 nt, Artificial Sequence
  HTT spacer sequence TTCN PAM
acuauagcggcagaguugaa

SEQ ID NO: 31144 - RNA, 20 nt, Artificial Sequence
  HTT spacer sequence TTCN PAM
aaaaccaggcagcuggugcc

SEQ ID NO: 31145 - RNA, 20 nt, Artificial Sequence
  HTT spacer sequence TTCN PAM
caagcccaggucuaggucac

SEQ ID NO: 31146 - RNA, 20 nt, Artificial Sequence
  HTT spacer sequence TTCN PAM
gggguccaggucuuucaugu

SEQ ID NO: 31147 - RNA, 20 nt, Artificial Sequence
  HTT spacer sequence TTCN PAM
uguguugcuuuugagcacag

SEQ ID NO: 31148 - RNA, 20 nt, Artificial Sequence
  HTT spacer sequence TTCN PAM
gauugaugagaauugcggag

SEQ ID NO: 31149 - RNA, 20 nt, Artificial Sequence
  HTT spacer sequence TTCN PAM
caucaaucagaaaaagcagg

SEQ ID NO: 31150 - RNA, 20 nt, Artificial Sequence
  HTT spacer sequence TTCN PAM
uccgcaauucucaucaauca

SEQ ID NO: 31151 - RNA, 20 nt, Artificial Sequence
  HTT spacer sequence TTCN PAM
ucacauacauauuuaccauc

SEQ ID NO: 31152 - RNA, 20 nt, Artificial Sequence
  HTT spacer sequence TTCN PAM
aaagagauccuuucugguaa

SEQ ID NO: 31153 - RNA, 20 nt, Artificial Sequence
  HTT spacer sequence TTCN PAM
gguaauuuuaagaauauacu

SEQ ID NO: 31154 - RNA, 20 nt, Artificial Sequence
  HTT spacer sequence TTCN PAM
uaaaauuaccagaaaggauc

SEQ ID NO: 31155 - RNA, 20 nt, Artificial Sequence
  HTT spacer sequence TTCN PAM
aguauauucuuaaaauuacc

SEQ ID NO: 31156 - RNA, 20 nt, Artificial Sequence
  HTT spacer sequence TTCN PAM
uaauauuuugguauucuagu

SEQ ID NO: 31157 - RNA, 20 nt, Artificial Sequence
  HTT spacer sequence TTCN PAM
caaaauaucuucuuaauauu

SEQ ID NO: 31158 - RNA, 20 nt, Artificial Sequence
  HTT spacer sequence TTCN PAM
gaaauugacaacaguuucug

SEQ ID NO: 31159 - RNA, 20 nt, Artificial Sequence
  HTT spacer sequence TTCN PAM
gaaauaccacuaaggaccuc

SEQ ID NO: 31160 - RNA, 20 nt, Artificial Sequence
  HTT spacer sequence TTCN PAM
guuuccucuuuaaaaauccc

SEQ ID NO: 31161 - RNA, 20 nt, Artificial Sequence
  HTT spacer sequence TTCN PAM
ucuuuaaaaauccccacauu

SEQ ID NO: 31162 - RNA, 20 nt, Artificial Sequence
  HTT spacer sequence TTCN PAM
uuaaguuaaaaaaauuaauc

SEQ ID NO: 31163 - RNA, 20 nt, Artificial Sequence
  HTT spacer sequence TTCN PAM
ccuuugagcuaucaauaaau

SEQ ID NO: 31164 - RNA, 20 nt, Artificial Sequence
  HTT spacer sequence TTCN PAM
ccccccuccuuugugaagug

SEQ ID NO: 31165 - RNA, 20 nt, Artificial Sequence
  HTT spacer sequence TTCN PAM
caaaggaggggggcgaaggu

SEQ ID NO: 31166 - RNA, 20 nt, Artificial Sequence
  HTT spacer sequence TTCN PAM
ugaggucugcuugaugcuug

SEQ ID NO: 31167 - RNA, 20 nt, Artificial Sequence
  HTT spacer sequence TTCN PAM
aagcaucaagcagaccucag

SEQ ID NO: 31168 - RNA, 20 nt, Artificial Sequence
  HTT spacer sequence TTCN PAM
ccguggucuccaucuccuga

SEQ ID NO: 31169 - RNA, 20 nt, Artificial Sequence
  HTT spacer sequence TTCN PAM
ccugccucagccucccgagu

SEQ ID NO: 31170 - RNA, 20 nt, Artificial Sequence
  HTT spacer sequence TTCN PAM
cgccauucuccugccucagc

SEQ ID NO: 31171 - RNA, 20 nt, Artificial Sequence
  HTT spacer sequence TTCN PAM
gucacccaggcuggagugca

SEQ ID NO: 31172 - RNA, 20 nt, Artificial Sequence
  HTT spacer sequence TTCN PAM
uuuuuugagauggagucucg

SEQ ID NO: 31173 - RNA, 20 nt, Artificial Sequence
  HTT spacer sequence TTCN PAM
uuuuuuuucuuuuuuugaga

SEQ ID NO: 31174 - RNA, 20 nt, Artificial Sequence
  HTT spacer sequence TTCN PAM
uuuuuauccagaggcucaag

SEQ ID NO: 31175 - RNA, 20 nt, Artificial Sequence
  HTT spacer sequence TTCN PAM
gccucuugcaguuacucacc

SEQ ID NO: 31176 - RNA, 20 nt, Artificial Sequence
  HTT spacer sequence TTCN PAM
uggugaguaacugcaagagg

SEQ ID NO: 31177 - RNA, 20 nt, Artificial Sequence
  HTT spacer sequence TTCN PAM
ccccagccgcucccucgccc

SEQ ID NO: 31178 - RNA, 20 nt, Artificial Sequence
  HTT spacer sequence TTCN PAM
aggacaucaacuucaggagg

SEQ ID NO: 31179 - RNA, 20 nt, Artificial Sequence
  HTT spacer sequence TTCN PAM
ggaggcuggaggcaaacaug

SEQ ID NO: 31180 - RNA, 20 nt, Artificial Sequence
  HTT spacer sequence TTCN PAM
guccugauguaagugcauug

SEQ ID NO: 31181 - RNA, 20 nt, Artificial Sequence
  HTT spacer sequence TTCN PAM
uagggcccugcucguccugg

SEQ ID NO: 31182 - RNA, 20 nt, Artificial Sequence
  HTT spacer sequence TTCN PAM
cuuucuuuuuucaaaaauag

SEQ ID NO: 31183 - RNA, 20 nt, Artificial Sequence
  HTT spacer sequence TTCN PAM
uuuuucaaaaauagagaugg

SEQ ID NO: 31184 - RNA, 20 nt, Artificial Sequence
  HTT spacer sequence TTCN PAM
aaaauagagauggggggucu

SEQ ID NO: 31185 - RNA, 20 nt, Artificial Sequence
  HTT spacer sequence TTCN PAM
guaucuguuguaauaaaaaa

SEQ ID NO: 31186 - RNA, 20 nt, Artificial Sequence
  HTT spacer sequence TTCN PAM
ucuucccucccccgucaccc

SEQ ID NO: 31187 - RNA, 20 nt, Artificial Sequence
  HTT spacer sequence TTCN PAM
ucccucccccgucaccccag

SEQ ID NO: 31188 - RNA, 20 nt, Artificial Sequence
  HTT spacer sequence TTCN PAM
cucccccgucaccccagugu

SEQ ID NO: 31189 - RNA, 20 nt, Artificial Sequence
  HTT spacer sequence TTCN PAM
cuucuuuucuagagacgggg

SEQ ID NO: 31190 - RNA, 20 nt, Artificial Sequence
  HTT spacer sequence TTCN PAM
uuucuagagacgggggucuc

SEQ ID NO: 31191 - RNA, 20 nt, Artificial Sequence
  HTT spacer sequence TTCN PAM
agagacgggggucucccuau

SEQ ID NO: 31192 - RNA, 20 nt, Artificial Sequence
  HTT spacer sequence TTCN PAM
aaaguagccugggcaacaua

SEQ ID NO: 31193 - RNA, 20 nt, Artificial Sequence
  HTT spacer sequence TTCN PAM
gggaggucaaggcaggagga

SEQ ID NO: 31194 - RNA, 20 nt, Artificial Sequence
  HTT spacer sequence TTCN PAM
ggucucagggcuggcuuucu

SEQ ID NO: 31195 - RNA, 20 nt, Artificial Sequence
  HTT spacer sequence TTCN PAM
cucucauucuuguguuuccc

SEQ ID NO: 31196 - RNA, 20 nt, Artificial Sequence
  HTT spacer sequence TTCN PAM
uguguuucccacagccguga

SEQ ID NO: 31197 - RNA, 20 nt, Artificial Sequence
  HTT spacer sequence TTCN PAM
cacagccgugaggcccugcu

SEQ ID NO: 31198 - RNA, 20 nt, Artificial Sequence
  HTT spacer sequence TTCN PAM
uuugucuggaacgcgugucc

SEQ ID NO: 31199 - RNA, 20 nt, Artificial Sequence
  HTT spacer sequence TTCN PAM
agacaaaggaagcagggccu

SEQ ID NO: 31200 - RNA, 20 nt, Artificial Sequence
  HTT spacer sequence TTCN PAM
caugagguccugggacugug

SEQ ID NO: 31201 - RNA, 20 nt, Artificial Sequence
  HTT spacer sequence TTCN PAM
ggguccucaguacggggcca

SEQ ID NO: 31202 - RNA, 20 nt, Artificial Sequence
  HTT spacer sequence TTCN PAM
ucuggacuguccccgagggg

SEQ ID NO: 31203 - RNA, 20 nt, Artificial Sequence
  HTT spacer sequence TTCN PAM
gccuccccaccuugagggua

SEQ ID NO: 31204 - RNA, 20 nt, Artificial Sequence
  HTT spacer sequence TTCN PAM
uacccucaagguggggaggc

SEQ ID NO: 31205 - RNA, 20 nt, Artificial Sequence
  HTT spacer sequence TTCN PAM
cucauucauacccucaaggu

SEQ ID NO: 31206 - RNA, 20 nt, Artificial Sequence
  HTT spacer sequence TTCN PAM
gcaaagcaguggcuccaaag

SEQ ID NO: 31207 - RNA, 20 nt, Artificial Sequence
  HTT spacer sequence TTCN PAM
cccaggacuugugcacuaca

SEQ ID NO: 31208 - RNA, 20 nt, Artificial Sequence
  HTT spacer sequence TTCN PAM
caggacugcgggugccuccg

SEQ ID NO: 31209 - RNA, 20 nt, Artificial Sequence
  HTT spacer sequence TTCN PAM
gugcuuuuuguuccuuugcc

SEQ ID NO: 31210 - RNA, 20 nt, Artificial Sequence
  HTT spacer sequence TTCN PAM
uuugcccugaaagugcaagg

SEQ ID NO: 31211 - RNA, 20 nt, Artificial Sequence
  HTT spacer sequence TTCN PAM
gggcaaaggaacaaaaagca

SEQ ID NO: 31212 - RNA, 20 nt, Artificial Sequence
  HTT spacer sequence TTCN PAM
uugcacuuucagggcaaagg

SEQ ID NO: 31213 - RNA, 20 nt, Artificial Sequence
  HTT spacer sequence TTCN PAM
ugucccagaggagggaccug

SEQ ID NO: 31214 - RNA, 20 nt, Artificial Sequence
  HTT spacer sequence TTCN PAM
gggagcugagcggagggaug

SEQ ID NO: 31215 - RNA, 20 nt, Artificial Sequence
  HTT spacer sequence TTCN PAM
cauccuccugcagguccacu

SEQ ID NO: 31216 - RNA, 20 nt, Artificial Sequence
  HTT spacer sequence TTCN PAM
ucagguuuucuccgggugcu

SEQ ID NO: 31217 - RNA, 20 nt, Artificial Sequence
  HTT spacer sequence TTCN PAM
ccgggugcuuugccaggagu

SEQ ID NO: 31218 - RNA, 20 nt, Artificial Sequence
  HTT spacer sequence TTCN PAM
uggugcacuccuggcaaagc

SEQ ID NO: 31219 - RNA, 20 nt, Artificial Sequence
  HTT spacer sequence TTCN PAM
cgccccugccuccaauucuu

SEQ ID NO: 31220 - RNA, 20 nt, Artificial Sequence
  HTT spacer sequence TTCN PAM
cacuucuccgguucugugcu

SEQ ID NO: 31221 - RNA, 20 nt, Artificial Sequence
  HTT spacer sequence TTCN PAM
ccgguucugugcugcaucuu

SEQ ID NO: 31222 - RNA, 20 nt, Artificial Sequence
  HTT spacer sequence TTCN PAM
gugcugcaucuuccaauacg

SEQ ID NO: 31223 - RNA, 20 nt, Artificial Sequence
  HTT spacer sequence TTCN PAM
aauacgugcaguccacccug

SEQ ID NO: 31224 - RNA, 20 nt, Artificial Sequence
  HTT spacer sequence TTCN PAM
guagugcaaaauggauugca

SEQ ID NO: 31225 - RNA, 20 nt, Artificial Sequence
  HTT spacer sequence TTCN PAM
ccuuuccguagugcaaaaug

SEQ ID NO: 31226 - RNA, 20 nt, Artificial Sequence
  HTT spacer sequence TTCN PAM
cacacacacacacacacaca

SEQ ID NO: 31227 - RNA, 20 nt, Artificial Sequence
  HTT spacer sequence TTCN PAM
ccagcuuuuagugucaccaa

SEQ ID NO: 31228 - RNA, 20 nt, Artificial Sequence
  HTT spacer sequence TTCN PAM
gaggacacauucugugauuu

SEQ ID NO: 31229 - RNA, 20 nt, Artificial Sequence
  HTT spacer sequence TTCN PAM
gugauuuagaaaaugccuca

SEQ ID NO: 31230 - RNA, 20 nt, Artificial Sequence
  HTT spacer sequence TTCN PAM
aaaucacagaauguguccuc

SEQ ID NO: 31231 - RNA, 20 nt, Artificial Sequence
  HTT spacer sequence TTCN PAM
uuugccaggccccucucacu

SEQ ID NO: 31232 - RNA, 20 nt, Artificial Sequence
  HTT spacer sequence TTCN PAM
uucuugggaacugagggagc

SEQ ID NO: 31233 - RNA, 20 nt, Artificial Sequence
  HTT spacer sequence TTCN PAM
ugggaacugagggagcugag

SEQ ID NO: 31234 - RNA, 20 nt, Artificial Sequence
  HTT spacer sequence TTCN PAM
caagaaugaaacgcccagca

SEQ ID NO: 31235 - RNA, 20 nt, Artificial Sequence
  HTT spacer sequence TTCN PAM
cagcucccucaguucccaag

SEQ ID NO: 31236 - RNA, 20 nt, Artificial Sequence
  HTT spacer sequence TTCN PAM
ugcuacacagccucaugccg

SEQ ID NO: 31237 - RNA, 20 nt, Artificial Sequence
  HTT spacer sequence TTCN PAM
cgguggugaaagggaucuac

SEQ ID NO: 31238 - RNA, 20 nt, Artificial Sequence
  HTT spacer sequence TTCN PAM
ccaccgagaacugcucgaua

SEQ ID NO: 31239 - RNA, 20 nt, Artificial Sequence
  HTT spacer sequence TTCN PAM
ucugcgguguccagguagau

SEQ ID NO: 31240 - RNA, 20 nt, Artificial Sequence
  HTT spacer sequence TTCN PAM
augcucgguuugcuaccggg

SEQ ID NO: 31241 - RNA, 20 nt, Artificial Sequence
  HTT spacer sequence TTCN PAM
gccaggggauggagacacac

SEQ ID NO: 31242 - RNA, 20 nt, Artificial Sequence
  HTT spacer sequence TTCN PAM
agcacagccgcuuuacguua

SEQ ID NO: 31243 - RNA, 20 nt, Artificial Sequence
  HTT spacer sequence TTCN PAM
aacagugacccagggaaaag

SEQ ID NO: 31244 - RNA, 20 nt, Artificial Sequence
  HTT spacer sequence TTCN PAM
cugggucacuguuggaacua

SEQ ID NO: 31245 - RNA, 20 nt, Artificial Sequence
  HTT spacer sequence TTCN PAM
agaccagccuggccaacaua

SEQ ID NO: 31246 - RNA, 20 nt, Artificial Sequence
  HTT spacer sequence TTCN PAM
cuauguuggccaggcugguc

SEQ ID NO: 31247 - RNA, 20 nt, Artificial Sequence
  HTT spacer sequence TTCN PAM
ccugccucagcaucccuacu

SEQ ID NO: 31248 - RNA, 20 nt, Artificial Sequence
  HTT spacer sequence TTCN PAM
agcgauucuccugccucagc

SEQ ID NO: 31249 - RNA, 20 nt, Artificial Sequence
  HTT spacer sequence TTCN PAM
gccucccagguucaagcgau

SEQ ID NO: 31250 - RNA, 20 nt, Artificial Sequence
  HTT spacer sequence TTCN PAM
gucgcccaagguggaguaca

SEQ ID NO: 31251 - RNA, 20 nt, Artificial Sequence
  HTT spacer sequence TTCN PAM
ucucacccaaaaaaaaaaaa

SEQ ID NO: 31252 - RNA, 20 nt, Artificial Sequence
  HTT spacer sequence TTCN PAM
ggacagcugcugauaugguc

SEQ ID NO: 31253 - RNA, 20 nt, Artificial Sequence
  HTT spacer sequence TTCN PAM
ugucauugggaccagggaca

SEQ ID NO: 31254 - RNA, 20 nt, Artificial Sequence
  HTT spacer sequence TTCN PAM
caugguaguucccugcuuug

SEQ ID NO: 31255 - RNA, 20 nt, Artificial Sequence
  HTT spacer sequence TTCN PAM
cugcuuugggaguacacuca

SEQ ID NO: 31256 - RNA, 20 nt, Artificial Sequence
  HTT spacer sequence TTCN PAM
aagaagaggucaggaagcag

SEQ ID NO: 31257 - RNA, 20 nt, Artificial Sequence
  HTT spacer sequence TTCN PAM
uggaauaaguaauguggucu

SEQ ID NO: 31258 - RNA, 20 nt, Artificial Sequence
  HTT spacer sequence TTCN PAM
ugaccucuucuuggaauaag

SEQ ID NO: 31259 - RNA, 20 nt, Artificial Sequence
  HTT spacer sequence TTCN PAM
cugcuuccugaccucuucuu

SEQ ID NO: 31260 - RNA, 20 nt, Artificial Sequence
  HTT spacer sequence TTCN PAM
uccuucccugcuuccugacc

SEQ ID NO: 31261 - RNA, 20 nt, Artificial Sequence
  HTT spacer sequence TTCN PAM
ggguuccuccuucccugcuu

SEQ ID NO: 31262 - RNA, 20 nt, Artificial Sequence
  HTT spacer sequence TTCN PAM
cugcggcuucucuguccugu

SEQ ID NO: 31263 - RNA, 20 nt, Artificial Sequence
  HTT spacer sequence TTCN PAM
cuguccuguuauucugugca

SEQ ID NO: 31264 - RNA, 20 nt, Artificial Sequence
  HTT spacer sequence TTCN PAM
gugcaugcagaugaucgaau

SEQ ID NO: 31265 - RNA, 20 nt, Artificial Sequence
  HTT spacer sequence TTCN PAM
aucaucugcaugcacagaau

SEQ ID NO: 31266 - RNA, 20 nt, Artificial Sequence
  HTT spacer sequence TTCN PAM
aagacaucaacaaaagugaa

SEQ ID NO: 31267 - RNA, 20 nt, Artificial Sequence
  HTT spacer sequence TTCN PAM
cuuuuguugaugucuuugaa

SEQ ID NO: 31268 - RNA, 20 nt, Artificial Sequence
  HTT spacer sequence TTCN PAM
ucacuuucacuuuuguugau

SEQ ID NO: 31269 - RNA, 20 nt, Artificial Sequence
  HTT spacer sequence TTCN PAM
ugucuagaucuaauggcaaa

SEQ ID NO: 31270 - RNA, 20 nt, Artificial Sequence
  HTT spacer sequence TTCN PAM
agaccaaacagaggcuucuu

SEQ ID NO: 31271 - RNA, 20 nt, Artificial Sequence
  HTT spacer sequence TTCN PAM
ucuauagacucuucagaaga

SEQ ID NO: 31272 - RNA, 20 nt, Artificial Sequence
  HTT spacer sequence TTCN PAM
auagacucuucagaagaggg

SEQ ID NO: 31273 - RNA, 20 nt, Artificial Sequence
  HTT spacer sequence TTCN PAM
gaagagggguaaaaagacuu

SEQ ID NO: 31274 - RNA, 20 nt, Artificial Sequence
  HTT spacer sequence TTCN PAM
gaagagucuauagaagaagc

SEQ ID NO: 31275 - RNA, 20 nt, Artificial Sequence
  HTT spacer sequence TTCN PAM
cauacacacacauauauuag

SEQ ID NO: 31276 - RNA, 20 nt, Artificial Sequence
  HTT spacer sequence TTCN PAM
ccuuggcagucaguauguuu

SEQ ID NO: 31277 - RNA, 20 nt, Artificial Sequence
  HTT spacer sequence TTCN PAM
guuugcgauggcuccuacag

SEQ ID NO: 31278 - RNA, 20 nt, Artificial Sequence
  HTT spacer sequence TTCN PAM
ggcuggccuccaccuagcac

SEQ ID NO: 31279 - RNA, 20 nt, Artificial Sequence
  HTT spacer sequence TTCN PAM
cauuguucuggcuggccucc

SEQ ID NO: 31280 - RNA, 20 nt, Artificial Sequence
  HTT spacer sequence TTCN PAM
ucccagcaacaaaccucacu

SEQ ID NO: 31281 - RNA, 20 nt, Artificial Sequence
  HTT spacer sequence TTCN PAM
gauccaaaacaggacuaccu

SEQ ID NO: 31282 - RNA, 20 nt, Artificial Sequence
  HTT spacer sequence TTCN PAM
agcauuuacaaacagguucc

SEQ ID NO: 31283 - RNA, 20 nt, Artificial Sequence
  HTT spacer sequence TTCN PAM
cgugucgcugacaaaauagu

SEQ ID NO: 31284 - RNA, 20 nt, Artificial Sequence
  HTT spacer sequence TTCN PAM
gagcccaguguaaacuauuu

SEQ ID NO: 31285 - RNA, 20 nt, Artificial Sequence
  HTT spacer sequence TTCN PAM
acaggaugccgauuucugag

SEQ ID NO: 31286 - RNA, 20 nt, Artificial Sequence
  HTT spacer sequence TTCN PAM
ucagauggcacucacagugc

SEQ ID NO: 31287 - RNA, 20 nt, Artificial Sequence
  HTT spacer sequence TTCN PAM
cccgcugcacggggaaagug

SEQ ID NO: 31288 - RNA, 20 nt, Artificial Sequence
  HTT spacer sequence TTCN PAM
ccgugcagcgggcgaaggag

SEQ ID NO: 31289 - RNA, 20 nt, Artificial Sequence
  HTT spacer sequence TTCN PAM
uuuuugaaaagggaauccug

SEQ ID NO: 31290 - RNA, 20 nt, Artificial Sequence
  HTT spacer sequence TTCN PAM
aaaaggaauccacuuucccc

SEQ ID NO: 31291 - RNA, 20 nt, Artificial Sequence
  HTT spacer sequence TTCN PAM
cuuuucaaaaaggaauccac

SEQ ID NO: 31292 - RNA, 20 nt, Artificial Sequence
  HTT spacer sequence TTCN PAM
acuaaaaauacaaaacuuag

SEQ ID NO: 31293 - RNA, 20 nt, Artificial Sequence
  HTT spacer sequence TTCN PAM
ccugccucagccucccaagu

SEQ ID NO: 31294 - RNA, 20 nt, Artificial Sequence
  HTT spacer sequence TTCN PAM
cgcgauucuccugccucagc

SEQ ID NO: 31295 - RNA, 20 nt, Artificial Sequence
  HTT spacer sequence TTCN PAM
uuuugagauggagucuugcg

SEQ ID NO: 31296 - RNA, 20 nt, Artificial Sequence
  HTT spacer sequence TTCN PAM
uucuuuuugagauggagucu

SEQ ID NO: 31297 - RNA, 20 nt, Artificial Sequence
  HTT spacer sequence TTCN PAM
uucuuucuuuuugagaugga

SEQ ID NO: 31298 - RNA, 20 nt, Artificial Sequence
  HTT spacer sequence TTCN PAM
auuuuucuuucuuucuuuuu

SEQ ID NO: 31299 - RNA, 20 nt, Artificial Sequence
  HTT spacer sequence TTCN PAM
aaaggauuccauuuuucuuu

SEQ ID NO: 31300 - RNA, 20 nt, Artificial Sequence
  HTT spacer sequence TTCN PAM
guaauagcauuaaauguaga

SEQ ID NO: 31301 - RNA, 20 nt, Artificial Sequence
  HTT spacer sequence TTCN PAM
augcaaagugucucuccuug

SEQ ID NO: 31302 - RNA, 20 nt, Artificial Sequence
  HTT spacer sequence TTCN PAM
ugggccauccuacuuugcac

SEQ ID NO: 31303 - RNA, 20 nt, Artificial Sequence
  HTT spacer sequence TTCN PAM
caggggguugauucagagcu

SEQ ID NO: 31304 - RNA, 20 nt, Artificial Sequence
  HTT spacer sequence TTCN PAM
gagcuuggccacuaacauuc

SEQ ID NO: 31305 - RNA, 20 nt, Artificial Sequence
  HTT spacer sequence TTCN PAM
aauccaucuuucuuucagua

SEQ ID NO: 31306 - RNA, 20 nt, Artificial Sequence
  HTT spacer sequence TTCN PAM
uucaguaugaaaaauaggcu

SEQ ID NO: 31307 - RNA, 20 nt, Artificial Sequence
  HTT spacer sequence TTCN PAM
guaugaaaaauaggcuaggc

SEQ ID NO: 31308 - RNA, 20 nt, Artificial Sequence
  HTT spacer sequence TTCN PAM
uacugaaagaaagauggauu

SEQ ID NO: 31309 - RNA, 20 nt, Artificial Sequence
  HTT spacer sequence TTCN PAM
agaccagcuuagccaacaug

SEQ ID NO: 31310 - RNA, 20 nt, Artificial Sequence
  HTT spacer sequence TTCN PAM
ccauguuggcuaagcugguc

SEQ ID NO: 31311 - RNA, 20 nt, Artificial Sequence
  HTT spacer sequence TTCN PAM
ccugccucagacucccaggu

SEQ ID NO: 31312 - RNA, 20 nt, Artificial Sequence
  HTT spacer sequence TTCN PAM
agcgauucuccugccucaga

SEQ ID NO: 31313 - RNA, 20 nt, Artificial Sequence
  HTT spacer sequence TTCN PAM
cucuugucacccaggcugga

SEQ ID NO: 31314 - RNA, 20 nt, Artificial Sequence
  HTT spacer sequence TTCN PAM
uuuuuuuuuuuuuuuuuuua

SEQ ID NO: 31315 - RNA, 20 nt, Artificial Sequence
  HTT spacer sequence TTCN PAM
caccuaaagcuuauuuuuuu

SEQ ID NO: 31316 - RNA, 20 nt, Artificial Sequence
  HTT spacer sequence TTCN PAM
cauggcugucuuuccucuga

SEQ ID NO: 31317 - RNA, 20 nt, Artificial Sequence
  HTT spacer sequence TTCN PAM
ucugagaacuaaggguuagg

SEQ ID NO: 31318 - RNA, 20 nt, Artificial Sequence
  HTT spacer sequence TTCN PAM
cagaggaaagacagccaugg

SEQ ID NO: 31319 - RNA, 20 nt, Artificial Sequence
  HTT spacer sequence TTCN PAM
caccuaacccuuaguucuca

SEQ ID NO: 31320 - RNA, 20 nt, Artificial Sequence
  HTT spacer sequence TTCN PAM
augcagggcuggcuacacac

SEQ ID NO: 31321 - RNA, 20 nt, Artificial Sequence
  HTT spacer sequence TTCN PAM
aucuccaaguguggacacug

SEQ ID NO: 31322 - RNA, 20 nt, Artificial Sequence
  HTT spacer sequence TTCN PAM
cacguuuuggggaaaaccug

SEQ ID NO: 31323 - RNA, 20 nt, Artificial Sequence
  HTT spacer sequence TTCN PAM
ccaaaacgugggaaccuggg

SEQ ID NO: 31324 - RNA, 20 nt, Artificial Sequence
  HTT spacer sequence TTCN PAM
cucaacggcagguuuucccc

SEQ ID NO: 31325 - RNA, 20 nt, Artificial Sequence
  HTT spacer sequence TTCN PAM
cucugugcaaucagauucuc

SEQ ID NO: 31326 - RNA, 20 nt, Artificial Sequence
  HTT spacer sequence TTCN PAM
ccccacacugcuucuuaggc

SEQ ID NO: 31327 - RNA, 20 nt, Artificial Sequence
  HTT spacer sequence TTCN PAM
uaggcagccagagacccugu

SEQ ID NO: 31328 - RNA, 20 nt, Artificial Sequence
  HTT spacer sequence TTCN PAM
ugccucagccaugguacaug

SEQ ID NO: 31329 - RNA, 20 nt, Artificial Sequence
  HTT spacer sequence TTCN PAM
gcauguaccauggcugaggc

SEQ ID NO: 31330 - RNA, 20 nt, Artificial Sequence
  HTT spacer sequence TTCN PAM
uauguaugugagcuaagcau

SEQ ID NO: 31331 - RNA, 20 nt, Artificial Sequence
  HTT spacer sequence TTCN PAM
ugaugugguagaugcuuagc

SEQ ID NO: 31332 - RNA, 20 nt, Artificial Sequence
  HTT spacer sequence TTCN PAM
ccuuauuuacuucaugaugu

SEQ ID NO: 31333 - RNA, 20 nt, Artificial Sequence
  HTT spacer sequence TTCN PAM
gguuuuugccugccuuaaaa

SEQ ID NO: 31334 - RNA, 20 nt, Artificial Sequence
  HTT spacer sequence TTCN PAM
agagcaaccuggccaacaug

SEQ ID NO: 31335 - RNA, 20 nt, Artificial Sequence
  HTT spacer sequence TTCN PAM
ccauguuggccagguugcuc

SEQ ID NO: 31336 - RNA, 20 nt, Artificial Sequence
  HTT spacer sequence TTCN PAM
ucagccuccugaguagcuag

SEQ ID NO: 31337 - RNA, 20 nt, Artificial Sequence
  HTT spacer sequence TTCN PAM
ccuuccucagccuccugagu

SEQ ID NO: 31338 - RNA, 20 nt, Artificial Sequence
  HTT spacer sequence TTCN PAM
agcaauucuccuuccucagc

SEQ ID NO: 31339 - RNA, 20 nt, Artificial Sequence
  HTT spacer sequence TTCN PAM
agguucaagcaauucuccuu

SEQ ID NO: 31340 - RNA, 20 nt, Artificial Sequence
  HTT spacer sequence TTCN PAM
uuaagugcagacaaccauuu

SEQ ID NO: 31341 - RNA, 20 nt, Artificial Sequence
  HTT spacer sequence TTCN PAM
cuuuccuuaagugcagacaa

SEQ ID NO: 31342 - RNA, 20 nt, Artificial Sequence
  HTT spacer sequence TTCN PAM
caucagccgugugccugagg

SEQ ID NO: 31343 - RNA, 20 nt, Artificial Sequence
  HTT spacer sequence TTCN PAM
cacuggggaccauggucagg

SEQ ID NO: 31344 - RNA, 20 nt, Artificial Sequence
  HTT spacer sequence TTCN PAM
uucucacuggggaccauggu

SEQ ID NO: 31345 - RNA, 20 nt, Artificial Sequence
  HTT spacer sequence TTCN PAM
acuuccuucucacuggggac

SEQ ID NO: 31346 - RNA, 20 nt, Artificial Sequence
  HTT spacer sequence TTCN PAM
uggcgccagggucugcucug

SEQ ID NO: 31347 - RNA, 20 nt, Artificial Sequence
  HTT spacer sequence TTCN PAM
aggugggacgagacgcuaac

SEQ ID NO: 31348 - RNA, 20 nt, Artificial Sequence
  HTT spacer sequence TTCN PAM
gcacuaauaccugaguuguc

SEQ ID NO: 31349 - RNA, 20 nt, Artificial Sequence
  HTT spacer sequence TTCN PAM
cuaaagcuggauugaagaaa

SEQ ID NO: 31350 - RNA, 20 nt, Artificial Sequence
  HTT spacer sequence TTCN PAM
auccagcuuuagugaaaaga

SEQ ID NO: 31351 - RNA, 20 nt, Artificial Sequence
  HTT spacer sequence TTCN PAM
ucaauccagcuuuagugaaa

SEQ ID NO: 31352 - RNA, 20 nt, Artificial Sequence
  HTT spacer sequence TTCN PAM
gugcuggggugcccaggugu

SEQ ID NO: 31353 - RNA, 20 nt, Artificial Sequence
  HTT spacer sequence TTCN PAM
cugcacccagggagaggcca

SEQ ID NO: 31354 - RNA, 20 nt, Artificial Sequence
  HTT spacer sequence TTCN PAM
caagcccccgcuggccucuc

SEQ ID NO: 31355 - RNA, 20 nt, Artificial Sequence
  HTT spacer sequence TTCN PAM
uggaccaccacaucucuggc

SEQ ID NO: 31356 - RNA, 20 nt, Artificial Sequence
  HTT spacer sequence TTCN PAM
ccagggcccgggugucagac

SEQ ID NO: 31357 - RNA, 20 nt, Artificial Sequence
  HTT spacer sequence TTCN PAM
ugcaucucccgauggcuguc

SEQ ID NO: 31358 - RNA, 20 nt, Artificial Sequence
  HTT spacer sequence TTCN PAM
uucgguuuguguguuugugg

SEQ ID NO: 31359 - RNA, 20 nt, Artificial Sequence
  HTT spacer sequence TTCN PAM
guuuguguguuuguggccag

SEQ ID NO: 31360 - RNA, 20 nt, Artificial Sequence
  HTT spacer sequence TTCN PAM
uuuucucugagcauaucuau

SEQ ID NO: 31361 - RNA, 20 nt, Artificial Sequence
  HTT spacer sequence TTCN PAM
cugagcauaucuaucugccc

SEQ ID NO: 31362 - RNA, 20 nt, Artificial Sequence
  HTT spacer sequence TTCN PAM
agggcagauagauaugcuca

SEQ ID NO: 31363 - RNA, 20 nt, Artificial Sequence
  HTT spacer sequence TTCN PAM
cguggagguuaagggcgcug

SEQ ID NO: 31364 - RNA, 20 nt, Artificial Sequence
  HTT spacer sequence TTCN PAM
gcgcccuuaaccuccacggg

SEQ ID NO: 31365 - RNA, 20 nt, Artificial Sequence
  HTT spacer sequence TTCN PAM
gcuggggugcucacccgcgg

SEQ ID NO: 31366 - RNA, 20 nt, Artificial Sequence
  HTT spacer sequence TTCN PAM
ccaagcgcacaaagccacgu

SEQ ID NO: 31367 - RNA, 20 nt, Artificial Sequence
  HTT spacer sequence TTCN PAM
gcuacgcccuggcguggggu

SEQ ID NO: 31368 - RNA, 20 nt, Artificial Sequence
  HTT spacer sequence TTCN PAM
gugccgguccacacccuucc

SEQ ID NO: 31369 - RNA, 20 nt, Artificial Sequence
  HTT spacer sequence TTCN PAM
ugcccuggcacacgcacggg

SEQ ID NO: 31370 - RNA, 20 nt, Artificial Sequence
  HTT spacer sequence TTCN PAM
cagggggcgacguuggagcu

SEQ ID NO: 31371 - RNA, 20 nt, Artificial Sequence
  HTT spacer sequence TTCN PAM
cuccccgcccagcuccaacg

SEQ ID NO: 31372 - RNA, 20 nt, Artificial Sequence
  HTT spacer sequence TTCN PAM
aggccgccagcgagggcccu

SEQ ID NO: 31373 - RNA, 20 nt, Artificial Sequence
  HTT spacer sequence TTCN PAM
cuaaggaucugggcgcagcu

SEQ ID NO: 31374 - RNA, 20 nt, Artificial Sequence
  HTT spacer sequence TTCN PAM
gcaccuucucuaaggaucug

SEQ ID NO: 31375 - RNA, 20 nt, Artificial Sequence
  HTT spacer sequence TTCN PAM
ugaacugugcuucgcaggau

SEQ ID NO: 31376 - RNA, 20 nt, Artificial Sequence
  HTT spacer sequence TTCN PAM
ggaaaaaggcccaaguuccg

SEQ ID NO: 31377 - RNA, 20 nt, Artificial Sequence
  HTT spacer sequence TTCN PAM
caggaugggccggcccggcg

SEQ ID NO: 31378 - RNA, 20 nt, Artificial Sequence
  HTT spacer sequence TTCN PAM
gcagggcagggcagcacuug

SEQ ID NO: 31379 - RNA, 20 nt, Artificial Sequence
  HTT spacer sequence TTCN PAM
gggaggagcugacggggaca

SEQ ID NO: 31380 - RNA, 20 nt, Artificial Sequence
  HTT spacer sequence TTCN PAM
ccuccgccccauccauucuc

SEQ ID NO: 31381 - RNA, 20 nt, Artificial Sequence
  HTT spacer sequence TTCN PAM
ccacugcugucagggcugcc

SEQ ID NO: 31382 - RNA, 20 nt, Artificial Sequence
  HTT spacer sequence TTCN PAM
cacgcagcaggcagcacaga

SEQ ID NO: 31383 - RNA, 20 nt, Artificial Sequence
  HTT spacer sequence TTCN PAM
aagucaccgaggccugugcc

SEQ ID NO: 31384 - RNA, 20 nt, Artificial Sequence
  HTT spacer sequence TTCN PAM
ucucccgcgcgcagcugucc

SEQ ID NO: 31385 - RNA, 20 nt, Artificial Sequence
  HTT spacer sequence TTCN PAM
caagagcagcaggagcgacc

SEQ ID NO: 31386 - RNA, 20 nt, Artificial Sequence
  HTT spacer sequence TTCN PAM
aggcggacguuucccuugca

SEQ ID NO: 31387 - RNA, 20 nt, Artificial Sequence
  HTT spacer sequence TTCN PAM
cuugcaucggggugugggga

SEQ ID NO: 31388 - RNA, 20 nt, Artificial Sequence
  HTT spacer sequence TTCN PAM
ccacaccccgaugcaaggga

SEQ ID NO: 31389 - RNA, 20 nt, Artificial Sequence
  HTT spacer sequence TTCN PAM
gcaggugcccaccgccggcu

SEQ ID NO: 31390 - RNA, 20 nt, Artificial Sequence
  HTT spacer sequence TTCN PAM
ucccaggacgggccccagug

SEQ ID NO: 31391 - RNA, 20 nt, Artificial Sequence
  HTT spacer sequence TTCN PAM
uuguacgaggggaaggggaa

SEQ ID NO: 31392 - RNA, 20 nt, Artificial Sequence
  HTT spacer sequence TTCN PAM
ccucguacaaagaaggcucc

SEQ ID NO: 31393 - RNA, 20 nt, Artificial Sequence
  HTT spacer sequence TTCN PAM
ccuuccccucguacaaagaa

SEQ ID NO: 31394 - RNA, 20 nt, Artificial Sequence
  HTT spacer sequence TTCN PAM
uugggggaauggaaauagcu

SEQ ID NO: 31395 - RNA, 20 nt, Artificial Sequence
  HTT spacer sequence TTCN PAM
cccaaagaauaaagacccca

SEQ ID NO: 31396 - RNA, 20 nt, Artificial Sequence
  HTT spacer sequence TTCN PAM
auucccccaaagaauaaaga

SEQ ID NO: 31397 - RNA, 20 nt, Artificial Sequence
  HTT spacer sequence TTCN PAM
ucugauugaggcaaaacuca

SEQ ID NO: 31398 - RNA, 20 nt, Artificial Sequence
  HTT spacer sequence TTCN PAM
gauugaggcaaaacucauua

SEQ ID NO: 31399 - RNA, 20 nt, Artificial Sequence
  HTT spacer sequence TTCN PAM
aaaaagccuuacucuuuaau

SEQ ID NO: 31400 - RNA, 20 nt, Artificial Sequence
  HTT spacer sequence TTCN PAM
gcagcugaggacagugaggc

SEQ ID NO: 31401 - RNA, 20 nt, Artificial Sequence
  HTT spacer sequence TTCN PAM
uucugcagcugaggacagug

SEQ ID NO: 31402 - RNA, 20 nt, Artificial Sequence
  HTT spacer sequence TTCN PAM
gagucuguaaaucauguagc

SEQ ID NO: 31403 - RNA, 20 nt, Artificial Sequence
  HTT spacer sequence TTCN PAM
acacugugcuacaugauuua

SEQ ID NO: 31404 - RNA, 20 nt, Artificial Sequence
  HTT spacer sequence TTCN PAM
guaacuaugccaauaaucgu

SEQ ID NO: 31405 - RNA, 20 nt, Artificial Sequence
  HTT spacer sequence TTCN PAM
cacgauuauuggcauaguua

SEQ ID NO: 31406 - RNA, 20 nt, Artificial Sequence
  HTT spacer sequence TTCN PAM
gcaaugagcagguauuauuu

SEQ ID NO: 31407 - RNA, 20 nt, Artificial Sequence
  HTT spacer sequence TTCN PAM
uguauuuucugcaaugagca

SEQ ID NO: 31408 - RNA, 20 nt, Artificial Sequence
  HTT spacer sequence TTCN PAM
ugcauguuuuccuguauuuu

SEQ ID NO: 31409 - RNA, 20 nt, Artificial Sequence
  HTT spacer sequence TTCN PAM
uuccugcauguuuuccugua

SEQ ID NO: 31410 - RNA, 20 nt, Artificial Sequence
  HTT spacer sequence TTCN PAM
acccccacccccauuuccac

SEQ ID NO: 31411 - RNA, 20 nt, Artificial Sequence
  HTT spacer sequence TTCN PAM
acucugacucuuuccaggag

SEQ ID NO: 31412 - RNA, 20 nt, Artificial Sequence
  HTT spacer sequence TTCN PAM
aggaguucuuccaucagugu

SEQ ID NO: 31413 - RNA, 20 nt, Artificial Sequence
  HTT spacer sequence TTCN PAM
uccaucaguguagacaaagu

SEQ ID NO: 31414 - RNA, 20 nt, Artificial Sequence
  HTT spacer sequence TTCN PAM
aucaguguagacaaagucca

SEQ ID NO: 31415 - RNA, 20 nt, Artificial Sequence
  HTT spacer sequence TTCN PAM
gcuguggacuuugucuacac

SEQ ID NO: 31416 - RNA, 20 nt, Artificial Sequence
  HTT spacer sequence TTCN PAM
uugccagccacagggccucu

SEQ ID NO: 31417 - RNA, 20 nt, Artificial Sequence
  HTT spacer sequence TTCN PAM
acaccugcgcgaggcaggcc

SEQ ID NO: 31418 - RNA, 20 nt, Artificial Sequence
  HTT spacer sequence TTCN PAM
aaugccucugacaggcaggu

SEQ ID NO: 31419 - RNA, 20 nt, Artificial Sequence
  HTT spacer sequence TTCN PAM
agauggaguugcucuuguuc

SEQ ID NO: 31420 - RNA, 20 nt, Artificial Sequence
  HTT spacer sequence TTCN PAM
caggagguuaggcauucuua

SEQ ID NO: 31421 - RNA, 20 nt, Artificial Sequence
  HTT spacer sequence TTCN PAM
uaguuacaggaugagauagg

SEQ ID NO: 31422 - RNA, 20 nt, Artificial Sequence
  HTT spacer sequence TTCN PAM
uuaaaacagucuguuuuauc

SEQ ID NO: 31423 - RNA, 20 nt, Artificial Sequence
  HTT spacer sequence TTCN PAM
cuauuuuggccagggugguc

SEQ ID NO: 31424 - RNA, 20 nt, Artificial Sequence
  HTT spacer sequence TTCN PAM
ccugccucagccucccgagu

SEQ ID NO: 31425 - RNA, 20 nt, Artificial Sequence
  HTT spacer sequence TTCN PAM
agagauucuccugccucagc

SEQ ID NO: 31426 - RNA, 20 nt, Artificial Sequence
  HTT spacer sequence TTCN PAM
uuauuuuauuauuuuuuuug

SEQ ID NO: 31427 - RNA, 20 nt, Artificial Sequence
  HTT spacer sequence TTCN PAM
uuauuuacuucuuuauuuua

SEQ ID NO: 31428 - RNA, 20 nt, Artificial Sequence
  HTT spacer sequence TTCN PAM
cagcuucuuuauuuacuucu

SEQ ID NO: 31429 - RNA, 20 nt, Artificial Sequence
  HTT spacer sequence TTCN PAM
gaugccauggcaacgucuga

SEQ ID NO: 31430 - RNA, 20 nt, Artificial Sequence
  HTT spacer sequence TTCN PAM
gacguugccauggcaucuga

SEQ ID NO: 31431 - RNA, 20 nt, Artificial Sequence
  HTT spacer sequence TTCN PAM
aaaaagaggaggaacucuca

SEQ ID NO: 31432 - RNA, 20 nt, Artificial Sequence
  HTT spacer sequence TTCN PAM
uccucuuuuuagaacauaca

SEQ ID NO: 31433 - RNA, 20 nt, Artificial Sequence
  HTT spacer sequence TTCN PAM
gggaaucgcccaccccuuuc

SEQ ID NO: 31434 - RNA, 20 nt, Artificial Sequence
  HTT spacer sequence TTCN PAM
cagaacugagaguuccuccu

SEQ ID NO: 31435 - RNA, 20 nt, Artificial Sequence
  HTT spacer sequence TTCN PAM
cagaaaucucaugaauaauc

SEQ ID NO: 31436 - RNA, 20 nt, Artificial Sequence
  HTT spacer sequence TTCN PAM
gggaaaggggugggcgauuc

SEQ ID NO: 31437 - RNA, 20 nt, Artificial Sequence
  HTT spacer sequence TTCN PAM
ugagauuucugggaaagggg

SEQ ID NO: 31438 - RNA, 20 nt, Artificial Sequence
  HTT spacer sequence TTCN PAM
ugauuauaugcuaaacaagg

SEQ ID NO: 31439 - RNA, 20 nt, Artificial Sequence
  HTT spacer sequence TTCN PAM
uuauuccuuuacuuuccuaa

SEQ ID NO: 31440 - RNA, 20 nt, Artificial Sequence
  HTT spacer sequence TTCN PAM
uuuacuuuccuaagaaacuu

SEQ ID NO: 31441 - RNA, 20 nt, Artificial Sequence
  HTT spacer sequence TTCN PAM
uaagaaacuugcuuucccuu

SEQ ID NO: 31442 - RNA, 20 nt, Artificial Sequence
  HTT spacer sequence TTCN PAM
uaggaaaguaaaggaauaaa

SEQ ID NO: 31443 - RNA, 20 nt, Artificial Sequence
  HTT spacer sequence TTCN PAM
cuuuauggauuagccucgaa

SEQ ID NO: 31444 - RNA, 20 nt, Artificial Sequence
  HTT spacer sequence TTCN PAM
aggcuaauccauaaagggaa

SEQ ID NO: 31445 - RNA, 20 nt, Artificial Sequence
  HTT spacer sequence TTCN PAM
ugagcgagauccaaguaccc

SEQ ID NO: 31446 - RNA, 20 nt, Artificial Sequence
  HTT spacer sequence TTCN PAM
uccucagcaggcaagaugga

SEQ ID NO: 31447 - RNA, 20 nt, Artificial Sequence
  HTT spacer sequence TTCN PAM
caggucuaguuuccuccuca

SEQ ID NO: 31448 - RNA, 20 nt, Artificial Sequence
  HTT spacer sequence TTCN PAM
uacccugggcugguggcuau

SEQ ID NO: 31449 - RNA, 20 nt, Artificial Sequence
  HTT spacer sequence TTCN PAM
auagccaccagcccagggua

SEQ ID NO: 31450 - RNA, 20 nt, Artificial Sequence
  HTT spacer sequence TTCN PAM
uuguuucuuuuuuugcuuaa

SEQ ID NO: 31451 - RNA, 20 nt, Artificial Sequence
  HTT spacer sequence TTCN PAM
uuuuuugcuuaagcuagucu

SEQ ID NO: 31452 - RNA, 20 nt, Artificial Sequence
  HTT spacer sequence TTCN PAM
ccaugcccaagugaaagcuu

SEQ ID NO: 31453 - RNA, 20 nt, Artificial Sequence
  HTT spacer sequence TTCN PAM
cuugggcauggggaaauuua

SEQ ID NO: 31454 - RNA, 20 nt, Artificial Sequence
  HTT spacer sequence TTCN PAM
cucagucaaagcuuucacuu

SEQ ID NO: 31455 - RNA, 20 nt, Artificial Sequence
  HTT spacer sequence TTCN PAM
auuaacauguugaacaucuc

SEQ ID NO: 31456 - RNA, 20 nt, Artificial Sequence
  HTT spacer sequence TTCN PAM
acauguuaauugaacaaguu

SEQ ID NO: 31457 - RNA, 20 nt, Artificial Sequence
  HTT spacer sequence TTCN PAM
cuuucuguuuauaagcaagc

SEQ ID NO: 31458 - RNA, 20 nt, Artificial Sequence
  HTT spacer sequence TTCN PAM
guuuauaagcaagcauguau

SEQ ID NO: 31459 - RNA, 20 nt, Artificial Sequence
  HTT spacer sequence TTCN PAM
auacauacaugcuugcuuau

SEQ ID NO: 31460 - RNA, 20 nt, Artificial Sequence
  HTT spacer sequence TTCN PAM
cuucaauacauacaugcuug

SEQ ID NO: 31461 - RNA, 20 nt, Artificial Sequence
  HTT spacer sequence TTCN PAM
aaguucucuucaauacauac

SEQ ID NO: 31462 - RNA, 20 nt, Artificial Sequence
  HTT spacer sequence TTCN PAM
uaauuucaaaguucucuuca

SEQ ID NO: 31463 - RNA, 20 nt, Artificial Sequence
  HTT spacer sequence TTCN PAM
ucuuaauuucaaaguucucu

SEQ ID NO: 31464 - RNA, 20 nt, Artificial Sequence
  HTT spacer sequence TTCN PAM
aguuuuaguguauaugcugc

SEQ ID NO: 31465 - RNA, 20 nt, Artificial Sequence
  HTT spacer sequence TTCN PAM
cuguaucauuccaguuuuag

SEQ ID NO: 31466 - RNA, 20 nt, Artificial Sequence
  HTT spacer sequence TTCN PAM
caaauuugugugucguccuu

SEQ ID NO: 31467 - RNA, 20 nt, Artificial Sequence
  HTT spacer sequence TTCN PAM
auacaaaaauauauuuaaaa

SEQ ID NO: 31468 - RNA, 20 nt, Artificial Sequence
  HTT spacer sequence TTCN PAM
uuuuuuaaauauauuuuugu

SEQ ID NO: 31469 - RNA, 20 nt, Artificial Sequence
  HTT spacer sequence TTCN PAM
uuccaugucauuuggcugcu

SEQ ID NO: 31470 - RNA, 20 nt, Artificial Sequence
  HTT spacer sequence TTCN PAM
augucauuuggcugcuuaaa

SEQ ID NO: 31471 - RNA, 20 nt, Artificial Sequence
  HTT spacer sequence TTCN PAM
agugauucucaugccucagc

SEQ ID NO: 31472 - RNA, 20 nt, Artificial Sequence
  HTT spacer sequence TTCN PAM
caugccucagcuucccggau

SEQ ID NO: 31473 - RNA, 20 nt, Artificial Sequence
  HTT spacer sequence TTCN PAM
cggauagcugggauuacagg

SEQ ID NO: 31474 - RNA, 20 nt, Artificial Sequence
  HTT spacer sequence TTCN PAM
ccauguugaccaggcugguc

SEQ ID NO: 31475 - RNA, 20 nt, Artificial Sequence
  HTT spacer sequence TTCN PAM
agaccagccuggucaacaug

SEQ ID NO: 31476 - RNA, 20 nt, Artificial Sequence
  HTT spacer sequence TTCN PAM
gucauccaugauauugugaa

SEQ ID NO: 31477 - RNA, 20 nt, Artificial Sequence
  HTT spacer sequence TTCN PAM
caauaucauggaugacugaa

SEQ ID NO: 31478 - RNA, 20 nt, Artificial Sequence
  HTT spacer sequence TTCN PAM
uucagucuccuggcauauau

SEQ ID NO: 31479 - RNA, 20 nt, Artificial Sequence
  HTT spacer sequence TTCN PAM
gucuccuggcauauauuucc

SEQ ID NO: 31480 - RNA, 20 nt, Artificial Sequence
  HTT spacer sequence TTCN PAM
ccaaauccuuggaaucuuca

SEQ ID NO: 31481 - RNA, 20 nt, Artificial Sequence
  HTT spacer sequence TTCN PAM
aaggauuuggggaaauauau

SEQ ID NO: 31482 - RNA, 20 nt, Artificial Sequence
  HTT spacer sequence TTCN PAM
aagugaugaaugucuuuuuu

SEQ ID NO: 31483 - RNA, 20 nt, Artificial Sequence
  HTT spacer sequence TTCN PAM
ucacuuugaagauuccaagg

SEQ ID NO: 31484 - RNA, 20 nt, Artificial Sequence
  HTT spacer sequence TTCN PAM
agauaggagguggggcuggu

SEQ ID NO: 31485 - RNA, 20 nt, Artificial Sequence
  HTT spacer sequence TTCN PAM
ggugaccagccccaccuccu

SEQ ID NO: 31486 - RNA, 20 nt, Artificial Sequence
  HTT spacer sequence TTCN PAM
uucuggugaccagccccacc

SEQ ID NO: 31487 - RNA, 20 nt, Artificial Sequence
  HTT spacer sequence TTCN PAM
ucuuucuggugaccagcccc

SEQ ID NO: 31488 - RNA, 20 nt, Artificial Sequence
  HTT spacer sequence TTCN PAM
aacccuaccuucuucuuucu

SEQ ID NO: 31489 - RNA, 20 nt, Artificial Sequence
  HTT spacer sequence TTCN PAM
cagagggcaagaguagggcu

SEQ ID NO: 31490 - RNA, 20 nt, Artificial Sequence
  HTT spacer sequence TTCN PAM
ucacauaggcaugauuuaau

SEQ ID NO: 31491 - RNA, 20 nt, Artificial Sequence
  HTT spacer sequence TTCN PAM
gagagcuuccggguaacgug

SEQ ID NO: 31492 - RNA, 20 nt, Artificial Sequence
  HTT spacer sequence TTCN PAM
ggguaacguggagguuucua

SEQ ID NO: 31493 - RNA, 20 nt, Artificial Sequence
  HTT spacer sequence TTCN PAM
agagggcagcgcaccucccu

SEQ ID NO: 31494 - RNA, 20 nt, Artificial Sequence
  HTT spacer sequence TTCN PAM
acggggacagaagcuccugu

SEQ ID NO: 31495 - RNA, 20 nt, Artificial Sequence
  HTT spacer sequence TTCN PAM
guccccguagaagggaggug

SEQ ID NO: 31496 - RNA, 20 nt, Artificial Sequence
  HTT spacer sequence TTCN PAM
agaacgcucccuaugcaucu

SEQ ID NO: 31497 - RNA, 20 nt, Artificial Sequence
  HTT spacer sequence TTCN PAM
ggaagggucccaagcacagg

SEQ ID NO: 31498 - RNA, 20 nt, Artificial Sequence
  HTT spacer sequence TTCN PAM
caucuggcuguucaucugua

SEQ ID NO: 31499 - RNA, 20 nt, Artificial Sequence
  HTT spacer sequence TTCN PAM
ucuguauccuguaaaauaug

SEQ ID NO: 31500 - RNA, 20 nt, Artificial Sequence
  HTT spacer sequence TTCN PAM
ugguuuauuacaaggcauau

SEQ ID NO: 31501 - RNA, 20 nt, Artificial Sequence
  HTT spacer sequence TTCN PAM
cugaguucuguaugcugauc

SEQ ID NO: 31502 - RNA, 20 nt, Artificial Sequence
  HTT spacer sequence TTCN PAM
guaugcugaucuagcaaauu

SEQ ID NO: 31503 - RNA, 20 nt, Artificial Sequence
  HTT spacer sequence TTCN PAM
auuaauuugcuagaucagca

SEQ ID NO: 31504 - RNA, 20 nt, Artificial Sequence
  HTT spacer sequence TTCN PAM
cacagcccccuccuuggguu

SEQ ID NO: 31505 - RNA, 20 nt, Artificial Sequence
  HTT spacer sequence TTCN PAM
gacugaccugcuaaacauug

SEQ ID NO: 31506 - RNA, 20 nt, Artificial Sequence
  HTT spacer sequence TTCN PAM
aaugccaacugcaagccccu

SEQ ID NO: 31507 - RNA, 20 nt, Artificial Sequence
  HTT spacer sequence TTCN PAM
gucuugugggaacugagucc

SEQ ID NO: 31508 - RNA, 20 nt, Artificial Sequence
  HTT spacer sequence TTCN PAM
cacaagacugaaccccguuu

SEQ ID NO: 31509 - RNA, 20 nt, Artificial Sequence
  HTT spacer sequence TTCN PAM
agucugacggcaucuaccug

SEQ ID NO: 31510 - RNA, 20 nt, Artificial Sequence
  HTT spacer sequence TTCN PAM
gcagcggacaccagcugggu

SEQ ID NO: 31511 - RNA, 20 nt, Artificial Sequence
  HTT spacer sequence TTCN PAM
ccccacccacaagcaagcaa

SEQ ID NO: 31512 - RNA, 20 nt, Artificial Sequence
  HTT spacer sequence TTCN PAM
guguugauucuugagugaga

SEQ ID NO: 31513 - RNA, 20 nt, Artificial Sequence
  HTT spacer sequence TTCN PAM
ugagugagagaacaggaaaa

SEQ ID NO: 31514 - RNA, 20 nt, Artificial Sequence
  HTT spacer sequence TTCN PAM
cucacucaagaaucaacaca

SEQ ID NO: 31515 - RNA, 20 nt, Artificial Sequence
  HTT spacer sequence TTCN PAM
uguucucucacucaagaauc

SEQ ID NO: 31516 - RNA, 20 nt, Artificial Sequence
  HTT spacer sequence TTCN PAM
ccuagauccucaggguggcu

SEQ ID NO: 31517 - RNA, 20 nt, Artificial Sequence
  HTT spacer sequence TTCN PAM
gccacccugaggaucuaggg

SEQ ID NO: 31518 - RNA, 20 nt, Artificial Sequence
  HTT spacer sequence TTCN PAM
auauguauauucagccaccc

SEQ ID NO: 31519 - RNA, 20 nt, Artificial Sequence
  HTT spacer sequence TTCN PAM
uaacuccuccuacagcguau

SEQ ID NO: 31520 - RNA, 20 nt, Artificial Sequence
  HTT spacer sequence TTCN PAM
ugccucuucaugggucacgu

SEQ ID NO: 31521 - RNA, 20 nt, Artificial Sequence
  HTT spacer sequence TTCN PAM
ugggucacguguucaaaaaa

SEQ ID NO: 31522 - RNA, 20 nt, Artificial Sequence
  HTT spacer sequence TTCN PAM
aaaaauguugggguuagcgu

SEQ ID NO: 31523 - RNA, 20 nt, Artificial Sequence
  HTT spacer sequence TTCN PAM
ucccucugacgucaaaaggu

SEQ ID NO: 31524 - RNA, 20 nt, Artificial Sequence
  HTT spacer sequence TTCN PAM
ccuuuugacgucagagggag

SEQ ID NO: 31525 - RNA, 20 nt, Artificial Sequence
  HTT spacer sequence TTCN PAM
cguguccucugcuucaccuu

SEQ ID NO: 31526 - RNA, 20 nt, Artificial Sequence
  HTT spacer sequence TTCN PAM
ugguaagagaccacagagcc

SEQ ID NO: 31527 - RNA, 20 nt, Artificial Sequence
  HTT spacer sequence TTCN PAM
cuuccugguaagagaccaca

SEQ ID NO: 31528 - RNA, 20 nt, Artificial Sequence
  HTT spacer sequence TTCN PAM
auugccuuuagccaaucauc

SEQ ID NO: 31529 - RNA, 20 nt, Artificial Sequence
  HTT spacer sequence TTCN PAM
uuuuuucuagagcugguuuc

SEQ ID NO: 31530 - RNA, 20 nt, Artificial Sequence
  HTT spacer sequence TTCN PAM
agagcugguuucuguuuauu

SEQ ID NO: 31531 - RNA, 20 nt, Artificial Sequence
  HTT spacer sequence TTCN PAM
guuuauucuuuaggaaggca

SEQ ID NO: 31532 - RNA, 20 nt, Artificial Sequence
  HTT spacer sequence TTCN PAM
uuaggaaggcauuccaguga

SEQ ID NO: 31533 - RNA, 20 nt, Artificial Sequence
  HTT spacer sequence TTCN PAM
uaaagaauaaacagaaacca

SEQ ID NO: 31534 - RNA, 20 nt, Artificial Sequence
  HTT spacer sequence TTCN PAM
agugaaaggguauuaaggaa

SEQ ID NO: 31535 - RNA, 20 nt, Artificial Sequence
  HTT spacer sequence TTCN PAM
cuggaaugccuuccuaaaga

SEQ ID NO: 31536 - RNA, 20 nt, Artificial Sequence
  HTT spacer sequence TTCN PAM
uuaauacccuuucacuggaa

SEQ ID NO: 31537 - RNA, 20 nt, Artificial Sequence
  HTT spacer sequence TTCN PAM
uggccgugacaggacagguc

SEQ ID NO: 31538 - RNA, 20 nt, Artificial Sequence
  HTT spacer sequence TTCN PAM
cugaggucuccucgaccaag

SEQ ID NO: 31539 - RNA, 20 nt, Artificial Sequence
  HTT spacer sequence TTCN PAM
uggucgaggagaccucagag

SEQ ID NO: 31540 - RNA, 20 nt, Artificial Sequence
  HTT spacer sequence TTCN PAM
uauguaccucaagggagcag

SEQ ID NO: 31541 - RNA, 20 nt, Artificial Sequence
  HTT spacer sequence TTCN PAM
aacacuguuuugagugcaua

SEQ ID NO: 31542 - RNA, 20 nt, Artificial Sequence
  HTT spacer sequence TTCN PAM
uuaaaauguucaaacacugu

SEQ ID NO: 31543 - RNA, 20 nt, Artificial Sequence
  HTT spacer sequence TTCN PAM
uuuaacagagguauauaaua

SEQ ID NO: 31544 - RNA, 20 nt, Artificial Sequence
  HTT spacer sequence TTCN PAM
gccaaauuaaauuuaaauga

SEQ ID NO: 31545 - RNA, 20 nt, Artificial Sequence
  HTT spacer sequence TTCN PAM
uugcucaauuaaacucauuu

SEQ ID NO: 31546 - RNA, 20 nt, Artificial Sequence
  HTT spacer sequence TTCN PAM
cgaauugggcagcccccaga

SEQ ID NO: 31547 - RNA, 20 nt, Artificial Sequence
  HTT spacer sequence TTCN PAM
ugaaucguucauugcucaau

SEQ ID NO: 31548 - RNA, 20 nt, Artificial Sequence
  HTT spacer sequence TTCN PAM
gggggcugcccaauucguga

SEQ ID NO: 31549 - RNA, 20 nt, Artificial Sequence
  HTT spacer sequence TTCN PAM
gagggacuccagggauaccu

SEQ ID NO: 31550 - RNA, 20 nt, Artificial Sequence
  HTT spacer sequence TTCN PAM
gaccacgagguaucccugga

SEQ ID NO: 31551 - RNA, 20 nt, Artificial Sequence
  HTT spacer sequence TTCN PAM
cuuuuuugucuauagauuug

SEQ ID NO: 31552 - RNA, 20 nt, Artificial Sequence
  HTT spacer sequence TTCN PAM
auaugucacuucccuuuuuu

SEQ ID NO: 31553 - RNA, 20 nt, Artificial Sequence
  HTT spacer sequence TTCN PAM
guacucaccuccaauuucua

SEQ ID NO: 31554 - RNA, 20 nt, Artificial Sequence
  HTT spacer sequence TTCN PAM
aacuguguccaaauaaggca

SEQ ID NO: 31555 - RNA, 20 nt, Artificial Sequence
  HTT spacer sequence TTCN PAM
cucguacacugcugagaguu

SEQ ID NO: 31556 - RNA, 20 nt, Artificial Sequence
  HTT spacer sequence TTCN PAM
gucuugucuaccaauuaagu

SEQ ID NO: 31557 - RNA, 20 nt, Artificial Sequence
  HTT spacer sequence TTCN PAM
uccacaaggacucaaauaga

SEQ ID NO: 31558 - RNA, 20 nt, Artificial Sequence
  HTT spacer sequence TTCN PAM
cuauuugaguccuuguggac

SEQ ID NO: 31559 - RNA, 20 nt, Artificial Sequence
  HTT spacer sequence TTCN PAM
caggccauauuuaguuugcu

SEQ ID NO: 31560 - RNA, 20 nt, Artificial Sequence
  HTT spacer sequence TTCN PAM
acccuuuuggucauuuucuc

SEQ ID NO: 31561 - RNA, 20 nt, Artificial Sequence
  HTT spacer sequence TTCN PAM
caauuuugagagauugacca

SEQ ID NO: 31562 - RNA, 20 nt, Artificial Sequence
  HTT spacer sequence TTCN PAM
ggaccaaauaaguacauuua

SEQ ID NO: 31563 - RNA, 20 nt, Artificial Sequence
  HTT spacer sequence TTCN PAM
cagaggguuucaggaccaaa

SEQ ID NO: 31564 - RNA, 20 nt, Artificial Sequence
  HTT spacer sequence TTCN PAM
acuguuucucagaggguuuc

SEQ ID NO: 31565 - RNA, 20 nt, Artificial Sequence
  HTT spacer sequence TTCN PAM
uaccuuugcaaaacucacug

SEQ ID NO: 31566 - RNA, 20 nt, Artificial Sequence
  HTT spacer sequence TTCN PAM
agcauaaggagguacccuca

SEQ ID NO: 31567 - RNA, 20 nt, Artificial Sequence
  HTT spacer sequence TTCN PAM
ccuauaaacaggacguucca

SEQ ID NO: 31568 - RNA, 20 nt, Artificial Sequence
  HTT spacer sequence TTCN PAM
uuaaagucuuaguuugauua

SEQ ID NO: 31569 - RNA, 20 nt, Artificial Sequence
  HTT spacer sequence TTCN PAM
ccuuucuguccagguucuca

SEQ ID NO: 31570 - RNA, 20 nt, Artificial Sequence
  HTT spacer sequence TTCN PAM
guccagguucucacuuaggu

SEQ ID NO: 31571 - RNA, 20 nt, Artificial Sequence
  HTT spacer sequence TTCN PAM
cacuuaggugagugugggcg

SEQ ID NO: 31572 - RNA, 20 nt, Artificial Sequence
  HTT spacer sequence TTCN PAM
aguauaauaaaaaauauaua

SEQ ID NO: 31573 - RNA, 20 nt, Artificial Sequence
  HTT spacer sequence TTCN PAM
auauauauauuuuuuauuau

SEQ ID NO: 31574 - RNA, 20 nt, Artificial Sequence
  HTT spacer sequence TTCN PAM
uauucuauauauauauuuuu

SEQ ID NO: 31575 - RNA, 20 nt, Artificial Sequence
  HTT spacer sequence TTCN PAM
ccguguuagccaggaugguc

SEQ ID NO: 31576 - RNA, 20 nt, Artificial Sequence
  HTT spacer sequence TTCN PAM
ccugccucagccucccgagu

SEQ ID NO: 31577 - RNA, 20 nt, Artificial Sequence
  HTT spacer sequence TTCN PAM
ugccauucuccugccucagc

SEQ ID NO: 31578 - RNA, 20 nt, Artificial Sequence
  HTT spacer sequence TTCN PAM
uuuuguuuuguuuuguuuug

SEQ ID NO: 31579 - RNA, 20 nt, Artificial Sequence
  HTT spacer sequence TTCN PAM
aguauaacuauucuuuuugu

SEQ ID NO: 31580 - RNA, 20 nt, Artificial Sequence
  HTT spacer sequence TTCN PAM
aauauuauaauaaucuuugu

SEQ ID NO: 31581 - RNA, 20 nt, Artificial Sequence
  HTT spacer sequence TTCN PAM
acaauuauaaccuaggaaaa

SEQ ID NO: 31582 - RNA, 20 nt, Artificial Sequence
  HTT spacer sequence TTCN PAM
uagguuauaauuguagaaca

SEQ ID NO: 31583 - RNA, 20 nt, Artificial Sequence
  HTT spacer sequence TTCN PAM
gcuccuaucucuguauggcc

SEQ ID NO: 31584 - RNA, 20 nt, Artificial Sequence
  HTT spacer sequence TTCN PAM
cacccugucccuucagcucc

SEQ ID NO: 31585 - RNA, 20 nt, Artificial Sequence
  HTT spacer sequence TTCN PAM
ggucacuucucacccugucc

SEQ ID NO: 31586 - RNA, 20 nt, Artificial Sequence
  HTT spacer sequence TTCN PAM
caggcacugucauuaccacu

SEQ ID NO: 31587 - RNA, 20 nt, Artificial Sequence
  HTT spacer sequence TTCN PAM
cuggucggcuaaguaacagg

SEQ ID NO: 31588 - RNA, 20 nt, Artificial Sequence
  HTT spacer sequence TTCN PAM
cuaaccccuccgccccucuc

SEQ ID NO: 31589 - RNA, 20 nt, Artificial Sequence
  HTT spacer sequence TTCN PAM
acaagagaugguggagcaga

SEQ ID NO: 31590 - RNA, 20 nt, Artificial Sequence
  HTT spacer sequence TTCN PAM
gcggucacgcuccuguuuca

SEQ ID NO: 31591 - RNA, 20 nt, Artificial Sequence
  HTT spacer sequence TTCN PAM
cuuucauguuccgcucugua

SEQ ID NO: 31592 - RNA, 20 nt, Artificial Sequence
  HTT spacer sequence TTCN PAM
uguuccgcucuguacaccug

SEQ ID NO: 31593 - RNA, 20 nt, Artificial Sequence
  HTT spacer sequence TTCN PAM
gcucuguacaccuggcucca

SEQ ID NO: 31594 - RNA, 20 nt, Artificial Sequence
  HTT spacer sequence TTCN PAM
agauagcaguagcagaauua

SEQ ID NO: 31595 - RNA, 20 nt, Artificial Sequence
  HTT spacer sequence TTCN PAM
gcuacugcuaucuagaagau

SEQ ID NO: 31596 - RNA, 20 nt, Artificial Sequence
  HTT spacer sequence TTCN PAM
cuaauucugcuacugcuauc

SEQ ID NO: 31597 - RNA, 20 nt, Artificial Sequence
  HTT spacer sequence TTCN PAM
aagacuuuagcacuuucacu

SEQ ID NO: 31598 - RNA, 20 nt, Artificial Sequence
  HTT spacer sequence TTCN PAM
augcauuucaaagacuuuag

SEQ ID NO: 31599 - RNA, 20 nt, Artificial Sequence
  HTT spacer sequence TTCN PAM
ucuaugcauuucaaagacuu

SEQ ID NO: 31600 - RNA, 20 nt, Artificial Sequence
  HTT spacer sequence TTCN PAM
cuguuugguagccgaggcgg

SEQ ID NO: 31601 - RNA, 20 nt, Artificial Sequence
  HTT spacer sequence TTCN PAM
gggccacuaccagucuccgu

SEQ ID NO: 31602 - RNA, 20 nt, Artificial Sequence
  HTT spacer sequence TTCN PAM
ucuaucucuuugucuugugu

SEQ ID NO: 31603 - RNA, 20 nt, Artificial Sequence
  HTT spacer sequence TTCN PAM
aucucuuugucuuguguccu

SEQ ID NO: 31604 - RNA, 20 nt, Artificial Sequence
  HTT spacer sequence TTCN PAM
gugaucucucaucuccgcag

SEQ ID NO: 31605 - RNA, 20 nt, Artificial Sequence
  HTT spacer sequence TTCN PAM
ccucaccugcggagaugaga

SEQ ID NO: 31606 - RNA, 20 nt, Artificial Sequence
  HTT spacer sequence TTCN PAM
ggucucagcacgucauucau

SEQ ID NO: 31607 - RNA, 20 nt, Artificial Sequence
  HTT spacer sequence TTCN PAM
uagguuacgguguccucaug

SEQ ID NO: 31608 - RNA, 20 nt, Artificial Sequence
  HTT spacer sequence TTCN PAM
uucagcuucugccauuccag

SEQ ID NO: 31609 - RNA, 20 nt, Artificial Sequence
  HTT spacer sequence TTCN PAM
gcuucugccauuccaguuga

SEQ ID NO: 31610 - RNA, 20 nt, Artificial Sequence
  HTT spacer sequence TTCN PAM
gccauuccaguugaagagag

SEQ ID NO: 31611 - RNA, 20 nt, Artificial Sequence
  HTT spacer sequence TTCN PAM
aguugaagagagaccauuug

SEQ ID NO: 31612 - RNA, 20 nt, Artificial Sequence
  HTT spacer sequence TTCN PAM
acuggaauggcagaagcuga

SEQ ID NO: 31613 - RNA, 20 nt, Artificial Sequence
  HTT spacer sequence TTCN PAM
agagauggcugcaugcagac

SEQ ID NO: 31614 - RNA, 20 nt, Artificial Sequence
  HTT spacer sequence TTCN PAM
cucaaagguuuuaaaugucu

SEQ ID NO: 31615 - RNA, 20 nt, Artificial Sequence
  HTT spacer sequence TTCN PAM
uuaaucucccacaacugaau

SEQ ID NO: 31616 - RNA, 20 nt, Artificial Sequence
  HTT spacer sequence TTCN PAM
guugugggagauuaaugaaa

SEQ ID NO: 31617 - RNA, 20 nt, Artificial Sequence
  HTT spacer sequence TTCN PAM
cccuaggccacaggugccag

SEQ ID NO: 31618 - RNA, 20 nt, Artificial Sequence
  HTT spacer sequence TTCN PAM
guuuagucaauucuauuauu

SEQ ID NO: 31619 - RNA, 20 nt, Artificial Sequence
  HTT spacer sequence TTCN PAM
auuauuuagcauaccuuuca

SEQ ID NO: 31620 - RNA, 20 nt, Artificial Sequence
  HTT spacer sequence TTCN PAM
caagggaauugaaagucugu

SEQ ID NO: 31621 - RNA, 20 nt, Artificial Sequence
  HTT spacer sequence TTCN PAM
cuugugaaagguaugcuaaa

SEQ ID NO: 31622 - RNA, 20 nt, Artificial Sequence
  HTT spacer sequence TTCN PAM
auucccuugugaaagguaug

SEQ ID NO: 31623 - RNA, 20 nt, Artificial Sequence
  HTT spacer sequence TTCN PAM
gguuauggccucuuuuacuc

SEQ ID NO: 31624 - RNA, 20 nt, Artificial Sequence
  HTT spacer sequence TTCN PAM
augguuuagaguaaaagagg

SEQ ID NO: 31625 - RNA, 20 nt, Artificial Sequence
  HTT spacer sequence TTCN PAM
ggaagaguaaagcccuccug

SEQ ID NO: 31626 - RNA, 20 nt, Artificial Sequence
  HTT spacer sequence TTCN PAM
agaagggcaucacuuuucca

SEQ ID NO: 31627 - RNA, 20 nt, Artificial Sequence
  HTT spacer sequence TTCN PAM
cuccucuuaacccacacuau

SEQ ID NO: 31628 - RNA, 20 nt, Artificial Sequence
  HTT spacer sequence TTCN PAM
guuucugacugauuacaggc

SEQ ID NO: 31629 - RNA, 20 nt, Artificial Sequence
  HTT spacer sequence TTCN PAM
gacugauuacaggcaacaua

SEQ ID NO: 31630 - RNA, 20 nt, Artificial Sequence
  HTT spacer sequence TTCN PAM
caccuacacuggaccuucau

SEQ ID NO: 31631 - RNA, 20 nt, Artificial Sequence
  HTT spacer sequence TTCN PAM
ucuuuuaucuaucaaaguau

SEQ ID NO: 31632 - RNA, 20 nt, Artificial Sequence
  HTT spacer sequence TTCN PAM
caaaugaaaguauaccccau

SEQ ID NO: 31633 - RNA, 20 nt, Artificial Sequence
  HTT spacer sequence TTCN PAM
uuugugaaggauuuugcagc

SEQ ID NO: 31634 - RNA, 20 nt, Artificial Sequence
  HTT spacer sequence TTCN PAM
uuucuauuauucauagaggc

SEQ ID NO: 31635 - RNA, 20 nt, Artificial Sequence
  HTT spacer sequence TTCN PAM
auuauucauagaggcauaag

SEQ ID NO: 31636 - RNA, 20 nt, Artificial Sequence
  HTT spacer sequence TTCN PAM
uagaggcauaagcaaggaac

SEQ ID NO: 31637 - RNA, 20 nt, Artificial Sequence
  HTT spacer sequence TTCN PAM
uugcuuaugccucuaugaau

SEQ ID NO: 31638 - RNA, 20 nt, Artificial Sequence
  HTT spacer sequence TTCN PAM
aaccucaggugauccgccca

SEQ ID NO: 31639 - RNA, 20 nt, Artificial Sequence
  HTT spacer sequence TTCN PAM
aaaccagccuggccaacuug

SEQ ID NO: 31640 - RNA, 20 nt, Artificial Sequence
  HTT spacer sequence TTCN PAM
gaguagcugguauuacaggu

SEQ ID NO: 31641 - RNA, 20 nt, Artificial Sequence
  HTT spacer sequence TTCN PAM
cauaccucagccuuccgagu

SEQ ID NO: 31642 - RNA, 20 nt, Artificial Sequence
  HTT spacer sequence TTCN PAM
agcgauucucauaccucagc

SEQ ID NO: 31643 - RNA, 20 nt, Artificial Sequence
  HTT spacer sequence TTCN PAM
uuuuuggagauggagucuug

SEQ ID NO: 31644 - RNA, 20 nt, Artificial Sequence
  HTT spacer sequence TTCN PAM
acugucaugagacucucuuu

SEQ ID NO: 31645 - RNA, 20 nt, Artificial Sequence
  HTT spacer sequence TTCN PAM
caucaaggaugccaucuucu

SEQ ID NO: 31646 - RNA, 20 nt, Artificial Sequence
  HTT spacer sequence TTCN PAM
ggggagagacuuccuuggcu

SEQ ID NO: 31647 - RNA, 20 nt, Artificial Sequence
  HTT spacer sequence TTCN PAM
uuggcuuuaccuuaaagguu

SEQ ID NO: 31648 - RNA, 20 nt, Artificial Sequence
  HTT spacer sequence TTCN PAM
aauggguguacaguuccagg

SEQ ID NO: 31649 - RNA, 20 nt, Artificial Sequence
  HTT spacer sequence TTCN PAM
aggaguguggauggacccuu

SEQ ID NO: 31650 - RNA, 20 nt, Artificial Sequence
  HTT spacer sequence TTCN PAM
caguugugagauuaugaacc

SEQ ID NO: 31651 - RNA, 20 nt, Artificial Sequence
  HTT spacer sequence TTCN PAM
uaaucucacaacugagaagg

SEQ ID NO: 31652 - RNA, 20 nt, Artificial Sequence
  HTT spacer sequence TTCN PAM
agaucccuaaguuuuguugc

SEQ ID NO: 31653 - RNA, 20 nt, Artificial Sequence
  HTT spacer sequence TTCN PAM
cugauguucucagaagaucc

SEQ ID NO: 31654 - RNA, 20 nt, Artificial Sequence
  HTT spacer sequence TTCN PAM
cagaagauccagucuucggg

SEQ ID NO: 31655 - RNA, 20 nt, Artificial Sequence
  HTT spacer sequence TTCN PAM
gagaacaucagagaaagacu

SEQ ID NO: 31656 - RNA, 20 nt, Artificial Sequence
  HTT spacer sequence TTCN PAM
gguucuagaaugcaaagggu

SEQ ID NO: 31657 - RNA, 20 nt, Artificial Sequence
  HTT spacer sequence TTCN PAM
agaaugcaaaggguuugacc

SEQ ID NO: 31658 - RNA, 20 nt, Artificial Sequence
  HTT spacer sequence TTCN PAM
agaacccgaagacuggaucu

SEQ ID NO: 31659 - RNA, 20 nt, Artificial Sequence
  HTT spacer sequence TTCN PAM
cugaggucaaacccuuugca

SEQ ID NO: 31660 - RNA, 20 nt, Artificial Sequence
  HTT spacer sequence TTCN PAM
augguucacugaggucaaac

SEQ ID NO: 31661 - RNA, 20 nt, Artificial Sequence
  HTT spacer sequence TTCN PAM
ggguuguauaaaagcucucg

SEQ ID NO: 31662 - RNA, 20 nt, Artificial Sequence
  HTT spacer sequence TTCN PAM
augcauguuuuccggguugu

SEQ ID NO: 31663 - RNA, 20 nt, Artificial Sequence
  HTT spacer sequence TTCN PAM
aucgucauuuucaaugcaug

SEQ ID NO: 31664 - RNA, 20 nt, Artificial Sequence
  HTT spacer sequence TTCN PAM
aucucaaaaaaaaaaaagug

SEQ ID NO: 31665 - RNA, 20 nt, Artificial Sequence
  HTT spacer sequence TTCN PAM
augaugagucacgaaaugca

SEQ ID NO: 31666 - RNA, 20 nt, Artificial Sequence
  HTT spacer sequence TTCN PAM
ugacucaucauggaaaagau

SEQ ID NO: 31667 - RNA, 20 nt, Artificial Sequence
  HTT spacer sequence TTCN PAM
gcauuucgugacucaucaug

SEQ ID NO: 31668 - RNA, 20 nt, Artificial Sequence
  HTT spacer sequence TTCN PAM
ugaguccuuaaagcuuuugu

SEQ ID NO: 31669 - RNA, 20 nt, Artificial Sequence
  HTT spacer sequence TTCN PAM
ccgugaguccauacuuaauu

SEQ ID NO: 31670 - RNA, 20 nt, Artificial Sequence
  HTT spacer sequence TTCN PAM
guccucuugaaucccaguug

SEQ ID NO: 31671 - RNA, 20 nt, Artificial Sequence
  HTT spacer sequence TTCN PAM
agaggacugaagucuaaugu

SEQ ID NO: 31672 - RNA, 20 nt, Artificial Sequence
  HTT spacer sequence TTCN PAM
ccaaauuaggugcauugcac

SEQ ID NO: 31673 - RNA, 20 nt, Artificial Sequence
  HTT spacer sequence TTCN PAM
uucaaauuguauaucugaac

SEQ ID NO: 31674 - RNA, 20 nt, Artificial Sequence
  HTT spacer sequence TTCN PAM
aauuguauaucugaacuauu

SEQ ID NO: 31675 - RNA, 20 nt, Artificial Sequence
  HTT spacer sequence TTCN PAM
gauauacaauuugaaugaaa

SEQ ID NO: 31676 - RNA, 20 nt, Artificial Sequence
  HTT spacer sequence TTCN PAM
gugucagcugauuuaagaug

SEQ ID NO: 31677 - RNA, 20 nt, Artificial Sequence
  HTT spacer sequence TTCN PAM
ucuuaaaucagcugacacug

SEQ ID NO: 31678 - RNA, 20 nt, Artificial Sequence
  HTT spacer sequence TTCN PAM
ugguauucaauuaauuuuug

SEQ ID NO: 31679 - RNA, 20 nt, Artificial Sequence
  HTT spacer sequence TTCN PAM
auuaauuuuuguucuacuug

SEQ ID NO: 31680 - RNA, 20 nt, Artificial Sequence
  HTT spacer sequence TTCN PAM
acuuggguuagcaguucuau

SEQ ID NO: 31681 - RNA, 20 nt, Artificial Sequence
  HTT spacer sequence TTCN PAM
auaagccagucagucuuuuc

SEQ ID NO: 31682 - RNA, 20 nt, Artificial Sequence
  HTT spacer sequence TTCN PAM
uuaaaguuccaggaauucuu

SEQ ID NO: 31683 - RNA, 20 nt, Artificial Sequence
  HTT spacer sequence TTCN PAM
aggaauucuuacccaguuca

SEQ ID NO: 31684 - RNA, 20 nt, Artificial Sequence
  HTT spacer sequence TTCN PAM
uggaacuuuaaugaaaagac

SEQ ID NO: 31685 - RNA, 20 nt, Artificial Sequence
  HTT spacer sequence TTCN PAM
uacccaguucaaaugauaug

SEQ ID NO: 31686 - RNA, 20 nt, Artificial Sequence
  HTT spacer sequence TTCN PAM
aaugauaugauucuaaaguu

SEQ ID NO: 31687 - RNA, 20 nt, Artificial Sequence
  HTT spacer sequence TTCN PAM
aaaguuauuagaaaccugua

SEQ ID NO: 31688 - RNA, 20 nt, Artificial Sequence
  HTT spacer sequence TTCN PAM
aauaacuuuagaaucauauc

SEQ ID NO: 31689 - RNA, 20 nt, Artificial Sequence
  HTT spacer sequence TTCN PAM
aagacugauuuuuagggucc

SEQ ID NO: 31690 - RNA, 20 nt, Artificial Sequence
  HTT spacer sequence TTCN PAM
uccuuuuaugaaucuccuaa

SEQ ID NO: 31691 - RNA, 20 nt, Artificial Sequence
  HTT spacer sequence TTCN PAM
uaaaaggaugaaaaggaccc

SEQ ID NO: 31692 - RNA, 20 nt, Artificial Sequence
  HTT spacer sequence TTCN PAM
aaaguauggugucuuuuagg

SEQ ID NO: 31693 - RNA, 20 nt, Artificial Sequence
  HTT spacer sequence TTCN PAM
gaaaccgcaccagcauuaag

SEQ ID NO: 31694 - RNA, 20 nt, Artificial Sequence
  HTT spacer sequence TTCN PAM
gaaaacuucaaaaguauggu

SEQ ID NO: 31695 - RNA, 20 nt, Artificial Sequence
  HTT spacer sequence TTCN PAM
acaguuaauugcuuaaugcu

SEQ ID NO: 31696 - RNA, 20 nt, Artificial Sequence
  HTT spacer sequence TTCN PAM
uugucaauuguguuuuuaac

SEQ ID NO: 31697 - RNA, 20 nt, Artificial Sequence
  HTT spacer sequence TTCN PAM
augauuuacaguaacuuaac

SEQ ID NO: 31698 - RNA, 20 nt, Artificial Sequence
  HTT spacer sequence TTCN PAM
aauaugccugagucuaugcu

SEQ ID NO: 31699 - RNA, 20 nt, Artificial Sequence
  HTT spacer sequence TTCN PAM
aaaauucuaauaugccugag

SEQ ID NO: 31700 - RNA, 20 nt, Artificial Sequence
  HTT spacer sequence TTCN PAM
aaaauuaaaugggauuucua

SEQ ID NO: 31701 - RNA, 20 nt, Artificial Sequence
  HTT spacer sequence TTCN PAM
cuaaaauguaaccugaagag

SEQ ID NO: 31702 - RNA, 20 nt, Artificial Sequence
  HTT spacer sequence TTCN PAM
gguuacauuuuagugaauga

SEQ ID NO: 31703 - RNA, 20 nt, Artificial Sequence
  HTT spacer sequence TTCN PAM
cauguaacuuaacauaucag

SEQ ID NO: 31704 - RNA, 20 nt, Artificial Sequence
  HTT spacer sequence TTCN PAM
gaccucuaacuuuggggugu

SEQ ID NO: 31705 - RNA, 20 nt, Artificial Sequence
  HTT spacer sequence TTCN PAM
aaauagucuuucugaccucu

SEQ ID NO: 31706 - RNA, 20 nt, Artificial Sequence
  HTT spacer sequence TTCN PAM
gcuucaaaauagucuuucug

SEQ ID NO: 31707 - RNA, 20 nt, Artificial Sequence
  HTT spacer sequence TTCN PAM
caaaaucaaauuucagcuuc

SEQ ID NO: 31708 - RNA, 20 nt, Artificial Sequence
  HTT spacer sequence TTCN PAM
uauaaaccuuuuauaauccc

SEQ ID NO: 31709 - RNA, 20 nt, Artificial Sequence
  HTT spacer sequence TTCN PAM
uucuuguugcccaggcugga

SEQ ID NO: 31710 - RNA, 20 nt, Artificial Sequence
  HTT spacer sequence TTCN PAM
uguugcccaggcuggaguac

SEQ ID NO: 31711 - RNA, 20 nt, Artificial Sequence
  HTT spacer sequence TTCN PAM
aguaauucuccugccucagc

SEQ ID NO: 31712 - RNA, 20 nt, Artificial Sequence
  HTT spacer sequence TTCN PAM
ccugccucagccucucuagu

SEQ ID NO: 31713 - RNA, 20 nt, Artificial Sequence
  HTT spacer sequence TTCN PAM
ccacguuggucaggcugguc

SEQ ID NO: 31714 - RNA, 20 nt, Artificial Sequence
  HTT spacer sequence TTCN PAM
agaccagccugaccaacgug

SEQ ID NO: 31715 - RNA, 20 nt, Artificial Sequence
  HTT spacer sequence TTCN PAM
augaaacaaaaaaagaucau

SEQ ID NO: 31716 - RNA, 20 nt, Artificial Sequence
  HTT spacer sequence TTCN PAM
uugaaccacaggcaaaagcc

SEQ ID NO: 31717 - RNA, 20 nt, Artificial Sequence
  HTT spacer sequence TTCN PAM
uuuaugauguggcuuggccc

SEQ ID NO: 31718 - RNA, 20 nt, Artificial Sequence
  HTT spacer sequence TTCN PAM
cugaguagcccuagugaccc

SEQ ID NO: 31719 - RNA, 20 nt, Artificial Sequence
  HTT spacer sequence TTCN PAM
cuuucccugaguagcccuag

SEQ ID NO: 31720 - RNA, 20 nt, Artificial Sequence
  HTT spacer sequence TTCN PAM
ggauucccuuucccugagua

SEQ ID NO: 31721 - RNA, 20 nt, Artificial Sequence
  HTT spacer sequence TTCN PAM
uacccuuuugcugugugcca

SEQ ID NO: 31722 - RNA, 20 nt, Artificial Sequence
  HTT spacer sequence TTCN PAM
uaccagucagauuucugacc

SEQ ID NO: 31723 - RNA, 20 nt, Artificial Sequence
  HTT spacer sequence TTCN PAM
gaccucucucucucugugug

SEQ ID NO: 31724 - RNA, 20 nt, Artificial Sequence
  HTT spacer sequence TTCN PAM
aacugguugaaugaauuaaa

SEQ ID NO: 31725 - RNA, 20 nt, Artificial Sequence
  HTT spacer sequence TTCN PAM
accaguuugaacacacagag

SEQ ID NO: 31726 - RNA, 20 nt, Artificial Sequence
  HTT spacer sequence TTCN PAM
uucaaccaguuugaacacac

SEQ ID NO: 31727 - RNA, 20 nt, Artificial Sequence
  HTT spacer sequence TTCN PAM
auuaaucaaaacuuuacaga

SEQ ID NO: 31728 - RNA, 20 nt, Artificial Sequence
  HTT spacer sequence TTCN PAM
cuacagccugagauuagccu

SEQ ID NO: 31729 - RNA, 20 nt, Artificial Sequence
  HTT spacer sequence TTCN PAM
cgugcuguucugugauaaaa

SEQ ID NO: 31730 - RNA, 20 nt, Artificial Sequence
  HTT spacer sequence TTCN PAM
gugauaaaaaggggcgccuu

SEQ ID NO: 31731 - RNA, 20 nt, Artificial Sequence
  HTT spacer sequence TTCN PAM
auccuaaggcgccccuuuuu

SEQ ID NO: 31732 - RNA, 20 nt, Artificial Sequence
  HTT spacer sequence TTCN PAM
gggaucugcagcaguuacug

SEQ ID NO: 31733 - RNA, 20 nt, Artificial Sequence
  HTT spacer sequence TTCN PAM
aaguggaacaggaauuuugg

SEQ ID NO: 31734 - RNA, 20 nt, Artificial Sequence
  HTT spacer sequence TTCN PAM
acuuggaagguggagaccaa

SEQ ID NO: 31735 - RNA, 20 nt, Artificial Sequence
  HTT spacer sequence TTCN PAM
uguuccacuuggaaggugga

SEQ ID NO: 31736 - RNA, 20 nt, Artificial Sequence
  HTT spacer sequence TTCN PAM
ugucauaguuagcucuacaa

SEQ ID NO: 31737 - RNA, 20 nt, Artificial Sequence
  HTT spacer sequence TTCN PAM
gcuggcaaagccucguaacu

SEQ ID NO: 31738 - RNA, 20 nt, Artificial Sequence
  HTT spacer sequence TTCN PAM
gggaagggcaauggagacug

SEQ ID NO: 31739 - RNA, 20 nt, Artificial Sequence
  HTT spacer sequence TTCN PAM
cagaaagagucuagaguagu

SEQ ID NO: 31740 - RNA, 20 nt, Artificial Sequence
  HTT spacer sequence TTCN PAM
guggugaucuggguuugauu

SEQ ID NO: 31741 - RNA, 20 nt, Artificial Sequence
  HTT spacer sequence TTCN PAM
uggcuuagggaaugaguacu

SEQ ID NO: 31742 - RNA, 20 nt, Artificial Sequence
  HTT spacer sequence TTCN PAM
cuaagccaggaaucaaaccc

SEQ ID NO: 31743 - RNA, 20 nt, Artificial Sequence
  HTT spacer sequence TTCN PAM
aauugauauuuggguaaccu

SEQ ID NO: 31744 - RNA, 20 nt, Artificial Sequence
  HTT spacer sequence TTCN PAM
cccccuccacaaacugucuu

SEQ ID NO: 31745 - RNA, 20 nt, Artificial Sequence
  HTT spacer sequence TTCN PAM
agacaguuuguggaggggga

SEQ ID NO: 31746 - RNA, 20 nt, Artificial Sequence
  HTT spacer sequence TTCN PAM
cagagcaccugggagguuac

SEQ ID NO: 31747 - RNA, 20 nt, Artificial Sequence
  HTT spacer sequence TTCN PAM
auaguuuaaaggcaggaaua

SEQ ID NO: 31748 - RNA, 20 nt, Artificial Sequence
  HTT spacer sequence TTCN PAM
ugccuuuaaacuauugaaag

SEQ ID NO: 31749 - RNA, 20 nt, Artificial Sequence
  HTT spacer sequence TTCN PAM
ucaggccaaacagccaauau

SEQ ID NO: 31750 - RNA, 20 nt, Artificial Sequence
  HTT spacer sequence TTCN PAM
uuuaaauugcuuauuaccca

SEQ ID NO: 31751 - RNA, 20 nt, Artificial Sequence
  HTT spacer sequence TTCN PAM
ggcucuaacagccugggacu

SEQ ID NO: 31752 - RNA, 20 nt, Artificial Sequence
  HTT spacer sequence TTCN PAM
caaggagucccaggcuguua

SEQ ID NO: 31753 - RNA, 20 nt, Artificial Sequence
  HTT spacer sequence TTCN PAM
caaaacggggucucuggcac

SEQ ID NO: 31754 - RNA, 20 nt, Artificial Sequence
  HTT spacer sequence TTCN PAM
ugaguaaaacagaguuuuuu

SEQ ID NO: 31755 - RNA, 20 nt, Artificial Sequence
  HTT spacer sequence TTCN PAM
gggguuucaugaguaaaaca

SEQ ID NO: 31756 - RNA, 20 nt, Artificial Sequence
  HTT spacer sequence TTCN PAM
aauuucugggguuucaugag

SEQ ID NO: 31757 - RNA, 20 nt, Artificial Sequence
  HTT spacer sequence TTCN PAM
uuucaaaaucuaaggcucug

SEQ ID NO: 31758 - RNA, 20 nt, Artificial Sequence
  HTT spacer sequence TTCN PAM
aaaucuaaggcucuguucug

SEQ ID NO: 31759 - RNA, 20 nt, Artificial Sequence
  HTT spacer sequence TTCN PAM
guuuugcauuggauuaucua

SEQ ID NO: 31760 - RNA, 20 nt, Artificial Sequence
  HTT spacer sequence TTCN PAM
gauacccccaaguaaaaaac

SEQ ID NO: 31761 - RNA, 20 nt, Artificial Sequence
  HTT spacer sequence TTCN PAM
cauagagacuugguguguaa

SEQ ID NO: 31762 - RNA, 20 nt, Artificial Sequence
  HTT spacer sequence TTCN PAM
ugccuaguuauuacacacca

SEQ ID NO: 31763 - RNA, 20 nt, Artificial Sequence
  HTT spacer sequence TTCN PAM
agaccagccugggcaacaug

SEQ ID NO: 31764 - RNA, 20 nt, Artificial Sequence
  HTT spacer sequence TTCN PAM
ccauguugcccaggcugguc

SEQ ID NO: 31765 - RNA, 20 nt, Artificial Sequence
  HTT spacer sequence TTCN PAM
gccucagccucccaaauagc

SEQ ID NO: 31766 - RNA, 20 nt, Artificial Sequence
  HTT spacer sequence TTCN PAM
ucugccucagccucccaaau

SEQ ID NO: 31767 - RNA, 20 nt, Artificial Sequence
  HTT spacer sequence TTCN PAM
cugcaaccuccgccuccugg

SEQ ID NO: 31768 - RNA, 20 nt, Artificial Sequence
  HTT spacer sequence TTCN PAM
agcugugccugcuuauuaua

SEQ ID NO: 31769 - RNA, 20 nt, Artificial Sequence
  HTT spacer sequence TTCN PAM
agggccuaauauaauaagca

SEQ ID NO: 31770 - RNA, 20 nt, Artificial Sequence
  HTT spacer sequence TTCN PAM
ugguccuguucuuccaagga

SEQ ID NO: 31771 - RNA, 20 nt, Artificial Sequence
  HTT spacer sequence TTCN PAM
uccaaggacuccauccuaaa

SEQ ID NO: 31772 - RNA, 20 nt, Artificial Sequence
  HTT spacer sequence TTCN PAM
aaggacuccauccuaaagcc

SEQ ID NO: 31773 - RNA, 20 nt, Artificial Sequence
  HTT spacer sequence TTCN PAM
aaauuggauuacuggcuuua

SEQ ID NO: 31774 - RNA, 20 nt, Artificial Sequence
  HTT spacer sequence TTCN PAM
aaguuucuaaauuggauuac

SEQ ID NO: 31775 - RNA, 20 nt, Artificial Sequence
  HTT spacer sequence TTCN PAM
uuuaccacuuucuaaguuuc

SEQ ID NO: 31776 - RNA, 20 nt, Artificial Sequence
  HTT spacer sequence TTCN PAM
ucugucugucuguguaguua

SEQ ID NO: 31777 - RNA, 20 nt, Artificial Sequence
  HTT spacer sequence TTCN PAM
gucugucuguguaguuauau

SEQ ID NO: 31778 - RNA, 20 nt, Artificial Sequence
  HTT spacer sequence TTCN PAM
agaccagccuggccaaccag

SEQ ID NO: 31779 - RNA, 20 nt, Artificial Sequence
  HTT spacer sequence TTCN PAM
ccugguuggccaggcugguc

SEQ ID NO: 31780 - RNA, 20 nt, Artificial Sequence
  HTT spacer sequence TTCN PAM
ccugccucagccuccugagu

SEQ ID NO: 31781 - RNA, 20 nt, Artificial Sequence
  HTT spacer sequence TTCN PAM
agugauucuccugccucagc

SEQ ID NO: 31782 - RNA, 20 nt, Artificial Sequence
  HTT spacer sequence TTCN PAM
uaaagccaauuaauuagagc

SEQ ID NO: 31783 - RNA, 20 nt, Artificial Sequence
  HTT spacer sequence TTCN PAM
aaauauuugauuuaagcacu

SEQ ID NO: 31784 - RNA, 20 nt, Artificial Sequence
  HTT spacer sequence TTCN PAM
uucaaaauauuugauuuaag

SEQ ID NO: 31785 - RNA, 20 nt, Artificial Sequence
  HTT spacer sequence TTCN PAM
guaaucuuugggaaauaaaa

SEQ ID NO: 31786 - RNA, 20 nt, Artificial Sequence
  HTT spacer sequence TTCN PAM
caaagauuacugaaguuaca

SEQ ID NO: 31787 - RNA, 20 nt, Artificial Sequence
  HTT spacer sequence TTCN PAM
ccaguaaccuuuaaaacuuu

SEQ ID NO: 31788 - RNA, 20 nt, Artificial Sequence
  HTT spacer sequence TTCN PAM
uuuuuuuuuuuuuuuuugag

SEQ ID NO: 31789 - RNA, 20 nt, Artificial Sequence
  HTT spacer sequence TTCN PAM
cucuuguugcccaggcugga

SEQ ID NO: 31790 - RNA, 20 nt, Artificial Sequence
  HTT spacer sequence TTCN PAM
agcaauucuccugccucagc

SEQ ID NO: 31791 - RNA, 20 nt, Artificial Sequence
  HTT spacer sequence TTCN PAM
ccugccucagccucccgagu

SEQ ID NO: 31792 - RNA, 20 nt, Artificial Sequence
  HTT spacer sequence TTCN PAM
ccauguuggccaggcugguc

SEQ ID NO: 31793 - RNA, 20 nt, Artificial Sequence
  HTT spacer sequence TTCN PAM
agaccagccuggccaacaug

SEQ ID NO: 31794 - RNA, 20 nt, Artificial Sequence
  HTT spacer sequence TTCN PAM
aaauuguucaaauuauuuug

SEQ ID NO: 31795 - RNA, 20 nt, Artificial Sequence
  HTT spacer sequence TTCN PAM
aauuauuuuggagcauuaga

SEQ ID NO: 31796 - RNA, 20 nt, Artificial Sequence
  HTT spacer sequence TTCN PAM
agauaaggccugcggacaug

SEQ ID NO: 31797 - RNA, 20 nt, Artificial Sequence
  HTT spacer sequence TTCN PAM
acauguccgcaggccuuauc

SEQ ID NO: 31798 - RNA, 20 nt, Artificial Sequence
  HTT spacer sequence TTCN PAM
uugccuagcugggggcaugg

SEQ ID NO: 31799 - RNA, 20 nt, Artificial Sequence
  HTT spacer sequence TTCN PAM
uuguaaucuucuuugccuag

SEQ ID NO: 31800 - RNA, 20 nt, Artificial Sequence
  HTT spacer sequence TTCN PAM
uauauaaaauuuauuuucuu

SEQ ID NO: 31801 - RNA, 20 nt, Artificial Sequence
  HTT spacer sequence TTCN PAM
ugcccuaaaguaaaauaacu

SEQ ID NO: 31802 - RNA, 20 nt, Artificial Sequence
  HTT spacer sequence TTCN PAM
cacuuguccuaaacacuccu

SEQ ID NO: 31803 - RNA, 20 nt, Artificial Sequence
  HTT spacer sequence TTCN PAM
caaauccuuuaacaacuuac

SEQ ID NO: 31804 - RNA, 20 nt, Artificial Sequence
  HTT spacer sequence TTCN PAM
ugcaccaaaaguaaaagaug

SEQ ID NO: 31805 - RNA, 20 nt, Artificial Sequence
  HTT spacer sequence TTCN PAM
auuacauguuauaaugguaa

SEQ ID NO: 31806 - RNA, 20 nt, Artificial Sequence
  HTT spacer sequence TTCN PAM
cucuccucacacaccuugca

SEQ ID NO: 31807 - RNA, 20 nt, Artificial Sequence
  HTT spacer sequence TTCN PAM
uauaaucuuuuaccaaaaac

SEQ ID NO: 31808 - RNA, 20 nt, Artificial Sequence
  HTT spacer sequence TTCN PAM
caugccuucuuauaaucuuu

SEQ ID NO: 31809 - RNA, 20 nt, Artificial Sequence
  HTT spacer sequence TTCN PAM
uuuacaagauuaauuuuuac

SEQ ID NO: 31810 - RNA, 20 nt, Artificial Sequence
  HTT spacer sequence TTCN PAM
gugugugaacauauugacua

SEQ ID NO: 31811 - RNA, 20 nt, Artificial Sequence
  HTT spacer sequence TTCN PAM
cacacagaauuucuuuuaca

SEQ ID NO: 31812 - RNA, 20 nt, Artificial Sequence
  HTT spacer sequence TTCN PAM
uuuuuuccagaaauugaaca

SEQ ID NO: 31813 - RNA, 20 nt, Artificial Sequence
  HTT spacer sequence TTCN PAM
agaaauugaacauugaagua

SEQ ID NO: 31814 - RNA, 20 nt, Artificial Sequence
  HTT spacer sequence TTCN PAM
ggaaaaaaugaauaauacuc

SEQ ID NO: 31815 - RNA, 20 nt, Artificial Sequence
  HTT spacer sequence TTCN PAM
auuucuggaaaaaaugaaua

SEQ ID NO: 31816 - RNA, 20 nt, Artificial Sequence
  HTT spacer sequence TTCN PAM
auguucaauuucuggaaaaa

SEQ ID NO: 31817 - RNA, 20 nt, Artificial Sequence
  HTT spacer sequence TTCN PAM
uuucuuucuauuuuuuuuuu

SEQ ID NO: 31818 - RNA, 20 nt, Artificial Sequence
  HTT spacer sequence TTCN PAM
uucuauuuuuuuuuuuugag

SEQ ID NO: 31819 - RNA, 20 nt, Artificial Sequence
  HTT spacer sequence TTCN PAM
auuuuuuuuuuuugagaugg

SEQ ID NO: 31820 - RNA, 20 nt, Artificial Sequence
  HTT spacer sequence TTCN PAM
ccugccucagccucuggagu

SEQ ID NO: 31821 - RNA, 20 nt, Artificial Sequence
  HTT spacer sequence TTCN PAM
ccauauuggccaggcugguc

SEQ ID NO: 31822 - RNA, 20 nt, Artificial Sequence
  HTT spacer sequence TTCN PAM
agaccagccuggccaauaug

SEQ ID NO: 31823 - RNA, 20 nt, Artificial Sequence
  HTT spacer sequence TTCN PAM
uaaagcacuguucugcucuu

SEQ ID NO: 31824 - RNA, 20 nt, Artificial Sequence
  HTT spacer sequence TTCN PAM
gcucuuucacaaaaauugua

SEQ ID NO: 31825 - RNA, 20 nt, Artificial Sequence
  HTT spacer sequence TTCN PAM
caaaaauuguaagggcuugg

SEQ ID NO: 31826 - RNA, 20 nt, Artificial Sequence
  HTT spacer sequence TTCN PAM
acugccucagccuccugagu

SEQ ID NO: 31827 - RNA, 20 nt, Artificial Sequence
  HTT spacer sequence TTCN PAM
ugccauucuacugccucagc

SEQ ID NO: 31828 - RNA, 20 nt, Artificial Sequence
  HTT spacer sequence TTCN PAM
aagucagccaauuugugcug

SEQ ID NO: 31829 - RNA, 20 nt, Artificial Sequence
  HTT spacer sequence TTCN PAM
uuuuuaaaugcaugucagug

SEQ ID NO: 31830 - RNA, 20 nt, Artificial Sequence
  HTT spacer sequence TTCN PAM
uucagaauguuccacuguag

SEQ ID NO: 31831 - RNA, 20 nt, Artificial Sequence
  HTT spacer sequence TTCN PAM
gaauguuccacuguagucau

SEQ ID NO: 31832 - RNA, 20 nt, Artificial Sequence
  HTT spacer sequence TTCN PAM
gaaugaacaacagugcacug

SEQ ID NO: 31833 - RNA, 20 nt, Artificial Sequence
  HTT spacer sequence TTCN PAM
acuguagucaucuuuaguaa

SEQ ID NO: 31834 - RNA, 20 nt, Artificial Sequence
  HTT spacer sequence TTCN PAM
ccauuucuguaagacuucac

SEQ ID NO: 31835 - RNA, 20 nt, Artificial Sequence
  HTT spacer sequence TTCN PAM
guaagacuucaccacuuucc

SEQ ID NO: 31836 - RNA, 20 nt, Artificial Sequence
  HTT spacer sequence TTCN PAM
ccacuuuccaugccuaacgu

SEQ ID NO: 31837 - RNA, 20 nt, Artificial Sequence
  HTT spacer sequence TTCN PAM
augccuaacguguaagccag

SEQ ID NO: 31838 - RNA, 20 nt, Artificial Sequence
  HTT spacer sequence TTCN PAM
ggcuuacacguuaggcaugg

SEQ ID NO: 31839 - RNA, 20 nt, Artificial Sequence
  HTT spacer sequence TTCN PAM
uucuggcuuacacguuaggc

SEQ ID NO: 31840 - RNA, 20 nt, Artificial Sequence
  HTT spacer sequence TTCN PAM
ggaaauuaaggaacccauuu

SEQ ID NO: 31841 - RNA, 20 nt, Artificial Sequence
  HTT spacer sequence TTCN PAM
ggaaaacuggguuccuucug

SEQ ID NO: 31842 - RNA, 20 nt, Artificial Sequence
  HTT spacer sequence TTCN PAM
uuaauuuccggaaaacuggg

SEQ ID NO: 31843 - RNA, 20 nt, Artificial Sequence
  HTT spacer sequence TTCN PAM
gguaaaaauggguuccuuaa

SEQ ID NO: 31844 - RNA, 20 nt, Artificial Sequence
  HTT spacer sequence TTCN PAM
cuugauuaauuuagccaaug

SEQ ID NO: 31845 - RNA, 20 nt, Artificial Sequence
  HTT spacer sequence TTCN PAM
uaccuaagugugcaagaaaa

SEQ ID NO: 31846 - RNA, 20 nt, Artificial Sequence
  HTT spacer sequence TTCN PAM
ugcacacuuagguaggaaaa

SEQ ID NO: 31847 - RNA, 20 nt, Artificial Sequence
  HTT spacer sequence TTCN PAM
uuuuucuugcacacuuaggu

SEQ ID NO: 31848 - RNA, 20 nt, Artificial Sequence
  HTT spacer sequence TTCN PAM
accccuuuguuucauuuuuc

SEQ ID NO: 31849 - RNA, 20 nt, Artificial Sequence
  HTT spacer sequence TTCN PAM
uggggauguuuguguucuac

SEQ ID NO: 31850 - RNA, 20 nt, Artificial Sequence
  HTT spacer sequence TTCN PAM
aaagccaaauuuuacacccc

SEQ ID NO: 31851 - RNA, 20 nt, Artificial Sequence
  HTT spacer sequence TTCN PAM
accaguuucuuucagaccca

SEQ ID NO: 31852 - RNA, 20 nt, Artificial Sequence
  HTT spacer sequence TTCN PAM
uucagacccagucagaugua

SEQ ID NO: 31853 - RNA, 20 nt, Artificial Sequence
  HTT spacer sequence TTCN PAM
gacccagucagauguaagag

SEQ ID NO: 31854 - RNA, 20 nt, Artificial Sequence
  HTT spacer sequence TTCN PAM
uggacccauccauuuucuuu

SEQ ID NO: 31855 - RNA, 20 nt, Artificial Sequence
  HTT spacer sequence TTCN PAM
uuggcgacuuccaaacccag

SEQ ID NO: 31856 - RNA, 20 nt, Artificial Sequence
  HTT spacer sequence TTCN PAM
aaacccaguuuggaucagaa

SEQ ID NO: 31857 - RNA, 20 nt, Artificial Sequence
  HTT spacer sequence TTCN PAM
gauccaaacuggguuuggaa

SEQ ID NO: 31858 - RNA, 20 nt, Artificial Sequence
  HTT spacer sequence TTCN PAM
uugugcaaauuucugaucca

SEQ ID NO: 31859 - RNA, 20 nt, Artificial Sequence
  HTT spacer sequence TTCN PAM
agcucucugaguuuucuuug

SEQ ID NO: 31860 - RNA, 20 nt, Artificial Sequence
  HTT spacer sequence TTCN PAM
cagagcagcuggggaucaug

SEQ ID NO: 31861 - RNA, 20 nt, Artificial Sequence
  HTT spacer sequence TTCN PAM
cucagugccccaggggucau

SEQ ID NO: 31862 - RNA, 20 nt, Artificial Sequence
  HTT spacer sequence TTCN PAM
aaugaccccuggggcacuga

SEQ ID NO: 31863 - RNA, 20 nt, Artificial Sequence
  HTT spacer sequence TTCN PAM
gacaccauguuaaaagaaaa

SEQ ID NO: 31864 - RNA, 20 nt, Artificial Sequence
  HTT spacer sequence TTCN PAM
uuuaacauggugucagaagu

SEQ ID NO: 31865 - RNA, 20 nt, Artificial Sequence
  HTT spacer sequence TTCN PAM
gccgaauuaaauuuaaagga

SEQ ID NO: 31866 - RNA, 20 nt, Artificial Sequence
  HTT spacer sequence TTCN PAM
gcugaaguuuuucuuuuaac

SEQ ID NO: 31867 - RNA, 20 nt, Artificial Sequence
  HTT spacer sequence TTCN PAM
uugcuuaauuaaacuccuuu

SEQ ID NO: 31868 - RNA, 20 nt, Artificial Sequence
  HTT spacer sequence TTCN PAM
ugaauugggcaguccucaga

SEQ ID NO: 31869 - RNA, 20 nt, Artificial Sequence
  HTT spacer sequence TTCN PAM
cgaaucauucauugcuuaau

SEQ ID NO: 31870 - RNA, 20 nt, Artificial Sequence
  HTT spacer sequence TTCN PAM
gaggacugcccaauucacga

SEQ ID NO: 31871 - RNA, 20 nt, Artificial Sequence
  HTT spacer sequence TTCN PAM
gagagacuccagggaugcuu

SEQ ID NO: 31872 - RNA, 20 nt, Artificial Sequence
  HTT spacer sequence TTCN PAM
uggucagaacaaauuuacag

SEQ ID NO: 31873 - RNA, 20 nt, Artificial Sequence
  HTT spacer sequence TTCN PAM
gaccaugaagcaucccugga

SEQ ID NO: 31874 - RNA, 20 nt, Artificial Sequence
  HTT spacer sequence TTCN PAM
cguuuuuugucuguaaauuu

SEQ ID NO: 31875 - RNA, 20 nt, Artificial Sequence
  HTT spacer sequence TTCN PAM
guacgucacuucccguuuuu

SEQ ID NO: 31876 - RNA, 20 nt, Artificial Sequence
  HTT spacer sequence TTCN PAM
guaccucaccuccaauuucu

SEQ ID NO: 31877 - RNA, 20 nt, Artificial Sequence
  HTT spacer sequence TTCN PAM
aaugaggcaaaugccgagcu

SEQ ID NO: 31878 - RNA, 20 nt, Artificial Sequence
  HTT spacer sequence TTCN PAM
cucauacacugcugagaguu

SEQ ID NO: 31879 - RNA, 20 nt, Artificial Sequence
  HTT spacer sequence TTCN PAM
aucuugucuaccuauaaguu

SEQ ID NO: 31880 - RNA, 20 nt, Artificial Sequence
  HTT spacer sequence TTCN PAM
uccacaaagacucaaauaca

SEQ ID NO: 31881 - RNA, 20 nt, Artificial Sequence
  HTT spacer sequence TTCN PAM
guauuugagucuuuguggau

SEQ ID NO: 31882 - RNA, 20 nt, Artificial Sequence
  HTT spacer sequence TTCN PAM
caggccauauuuaguuugcu

SEQ ID NO: 31883 - RNA, 20 nt, Artificial Sequence
  HTT spacer sequence TTCN PAM
gaaaauuuagaacaauuucc

SEQ ID NO: 31884 - RNA, 20 nt, Artificial Sequence
  HTT spacer sequence TTCN PAM
gaagggcaguuuggucauau

SEQ ID NO: 31885 - RNA, 20 nt, Artificial Sequence
  HTT spacer sequence TTCN PAM
aaauuuucagaagggcaguu

SEQ ID NO: 31886 - RNA, 20 nt, Artificial Sequence
  HTT spacer sequence TTCN PAM
ccuuucaccaaaaacguauu

SEQ ID NO: 31887 - RNA, 20 nt, Artificial Sequence
  HTT spacer sequence TTCN PAM
ccaaaaacguauuauaaugc

SEQ ID NO: 31888 - RNA, 20 nt, Artificial Sequence
  HTT spacer sequence TTCN PAM
ccaaaaaucagguuuuucuu

SEQ ID NO: 31889 - RNA, 20 nt, Artificial Sequence
  HTT spacer sequence TTCN PAM
uuuggcaaacaauuucacca

SEQ ID NO: 31890 - RNA, 20 nt, Artificial Sequence
  HTT spacer sequence TTCN PAM
ccagaaacuagguauuuccu

SEQ ID NO: 31891 - RNA, 20 nt, Artificial Sequence
  HTT spacer sequence TTCN PAM
ggugaaauuguuugccaaaa

SEQ ID NO: 31892 - RNA, 20 nt, Artificial Sequence
  HTT spacer sequence TTCN PAM
uuuucuuuucuuucuuuuaa

SEQ ID NO: 31893 - RNA, 20 nt, Artificial Sequence
  HTT spacer sequence TTCN PAM
uuucuuucuuuuaaaauuug

SEQ ID NO: 31894 - RNA, 20 nt, Artificial Sequence
  HTT spacer sequence TTCN PAM
uucuuuuaaaauuuguagua

SEQ ID NO: 31895 - RNA, 20 nt, Artificial Sequence
  HTT spacer sequence TTCN PAM
uuuaaaauuuguaguaaaau

SEQ ID NO: 31896 - RNA, 20 nt, Artificial Sequence
  HTT spacer sequence TTCN PAM
gaaacaaugucauacaguca

SEQ ID NO: 31897 - RNA, 20 nt, Artificial Sequence
  HTT spacer sequence TTCN PAM
gaacccuaugcuuaaaaauc

SEQ ID NO: 31898 - RNA, 20 nt, Artificial Sequence
  HTT spacer sequence TTCN PAM
uucaaucaguuugcacaguu

SEQ ID NO: 31899 - RNA, 20 nt, Artificial Sequence
  HTT spacer sequence TTCN PAM
aucaguuugcacaguuaacu

SEQ ID NO: 31900 - RNA, 20 nt, Artificial Sequence
  HTT spacer sequence TTCN PAM
gcuuuacaagaugcaaagag

SEQ ID NO: 31901 - RNA, 20 nt, Artificial Sequence
  HTT spacer sequence TTCN PAM
uggggacagagcuucagcuu

SEQ ID NO: 31902 - RNA, 20 nt, Artificial Sequence
  HTT spacer sequence TTCN PAM
accagccccuggcaauuacc

SEQ ID NO: 31903 - RNA, 20 nt, Artificial Sequence
  HTT spacer sequence TTCN PAM
gcccucuguuuuuaugaauu

SEQ ID NO: 31904 - RNA, 20 nt, Artificial Sequence
  HTT spacer sequence TTCN PAM
uaaaaacagagggcagaaug

SEQ ID NO: 31905 - RNA, 20 nt, Artificial Sequence
  HTT spacer sequence TTCN PAM
acugagacaggagauguaga

SEQ ID NO: 31906 - RNA, 20 nt, Artificial Sequence
  HTT spacer sequence TTCN PAM
uuuucuuuuuuuuuugaggc

SEQ ID NO: 31907 - RNA, 20 nt, Artificial Sequence
  HTT spacer sequence TTCN PAM
uuuuuuuuugaggcagaguc

SEQ ID NO: 31908 - RNA, 20 nt, Artificial Sequence
  HTT spacer sequence TTCN PAM
agcaauacuccugucucagc

SEQ ID NO: 31909 - RNA, 20 nt, Artificial Sequence
  HTT spacer sequence TTCN PAM
ccguguuggccaggaugguc

SEQ ID NO: 31910 - RNA, 20 nt, Artificial Sequence
  HTT spacer sequence TTCN PAM
ucuccugaccucgugaucug

SEQ ID NO: 31911 - RNA, 20 nt, Artificial Sequence
  HTT spacer sequence TTCN PAM
cuuagcauaaugaccucaag

SEQ ID NO: 31912 - RNA, 20 nt, Artificial Sequence
  HTT spacer sequence TTCN PAM
uccauguuguaguguguguc

SEQ ID NO: 31913 - RNA, 20 nt, Artificial Sequence
  HTT spacer sequence TTCN PAM
gacacacacuacaacaugga

SEQ ID NO: 31914 - RNA, 20 nt, Artificial Sequence
  HTT spacer sequence TTCN PAM
cuccuauuuaaggccaaaac

SEQ ID NO: 31915 - RNA, 20 nt, Artificial Sequence
  HTT spacer sequence TTCN PAM
auuguacauauguuacugga

SEQ ID NO: 31916 - RNA, 20 nt, Artificial Sequence
  HTT spacer sequence TTCN PAM
aguaacauauguacaaugga

SEQ ID NO: 31917 - RNA, 20 nt, Artificial Sequence
  HTT spacer sequence TTCN PAM
uggaucuugcucaagaaaga

SEQ ID NO: 31918 - RNA, 20 nt, Artificial Sequence
  HTT spacer sequence TTCN PAM
ugagcaagauccaagaaccc

SEQ ID NO: 31919 - RNA, 20 nt, Artificial Sequence
  HTT spacer sequence TTCN PAM
uucuugagcaagauccaaga

SEQ ID NO: 31920 - RNA, 20 nt, Artificial Sequence
  HTT spacer sequence TTCN PAM
gacgaguccacagaauaaaa

SEQ ID NO: 31921 - RNA, 20 nt, Artificial Sequence
  HTT spacer sequence TTCN PAM
guggacucgucugaauucuu

SEQ ID NO: 31922 - RNA, 20 nt, Artificial Sequence
  HTT spacer sequence TTCN PAM
uuuuauucuguggacucguc

SEQ ID NO: 31923 - RNA, 20 nt, Artificial Sequence
  HTT spacer sequence TTCN PAM
uaguaaacuuacuuucauuu

SEQ ID NO: 31924 - RNA, 20 nt, Artificial Sequence
  HTT spacer sequence TTCN PAM
uuggcuuucuuaguaaacuu

SEQ ID NO: 31925 - RNA, 20 nt, Artificial Sequence
  HTT spacer sequence TTCN PAM
cuauuccuuggcuuucuuag

SEQ ID NO: 31926 - RNA, 20 nt, Artificial Sequence
  HTT spacer sequence TTCN PAM
uuuuauuuauuuauuuauuu

SEQ ID NO: 31927 - RNA, 20 nt, Artificial Sequence
  HTT spacer sequence TTCN PAM
ugccauucuucugccucagc

SEQ ID NO: 31928 - RNA, 20 nt, Artificial Sequence
  HTT spacer sequence TTCN PAM
ucugccucagccuccugagu

SEQ ID NO: 31929 - RNA, 20 nt, Artificial Sequence
  HTT spacer sequence TTCN PAM
gccucagccuccugaguagc

SEQ ID NO: 31930 - RNA, 20 nt, Artificial Sequence
  HTT spacer sequence TTCN PAM
ccauguuagccaggaugguc

SEQ ID NO: 31931 - RNA, 20 nt, Artificial Sequence
  HTT spacer sequence TTCN PAM
ugauuauaugcuaaacaaga

SEQ ID NO: 31932 - RNA, 20 nt, Artificial Sequence
  HTT spacer sequence TTCN PAM
ugaguuuuccgugaaagggg

SEQ ID NO: 31933 - RNA, 20 nt, Artificial Sequence
  HTT spacer sequence TTCN PAM
gugaaaggggugggcaauuc

SEQ ID NO: 31934 - RNA, 20 nt, Artificial Sequence
  HTT spacer sequence TTCN PAM
cggaaaacucaugaauaauc

SEQ ID NO: 31935 - RNA, 20 nt, Artificial Sequence
  HTT spacer sequence TTCN PAM
cagaacugaggguuucuccc

SEQ ID NO: 31936 - RNA, 20 nt, Artificial Sequence
  HTT spacer sequence TTCN PAM
gggaauugcccaccccuuuc

SEQ ID NO: 31937 - RNA, 20 nt, Artificial Sequence
  HTT spacer sequence TTCN PAM
ccccuuuuuagaacauauag

SEQ ID NO: 31938 - RNA, 20 nt, Artificial Sequence
  HTT spacer sequence TTCN PAM
aaaaaggggagaaacccuca

SEQ ID NO: 31939 - RNA, 20 nt, Artificial Sequence
  HTT spacer sequence TTCN PAM
aggccaggcaugguggcuca

SEQ ID NO: 31940 - RNA, 20 nt, Artificial Sequence
  HTT spacer sequence TTCN PAM
ccauguuggucaagcugguc

SEQ ID NO: 31941 - RNA, 20 nt, Artificial Sequence
  HTT spacer sequence TTCN PAM
ccugccucagccucccgagu

SEQ ID NO: 31942 - RNA, 20 nt, Artificial Sequence
  HTT spacer sequence TTCN PAM
agcgauucuccugccucagc

SEQ ID NO: 31943 - RNA, 20 nt, Artificial Sequence
  HTT spacer sequence TTCN PAM
cggguucaagcgauucuccu

SEQ ID NO: 31944 - RNA, 20 nt, Artificial Sequence
  HTT spacer sequence TTCN PAM
uguugugcaggcuggagugc

SEQ ID NO: 31945 - RNA, 20 nt, Artificial Sequence
  HTT spacer sequence TTCN PAM
uucuuguugugcaggcugga

SEQ ID NO: 31946 - RNA, 20 nt, Artificial Sequence
  HTT spacer sequence TTCN PAM
uuugagacagaguuucauuc

SEQ ID NO: 31947 - RNA, 20 nt, Artificial Sequence
  HTT spacer sequence TTCN PAM
auuuuuuuuuuuucuuuuga

SEQ ID NO: 31948 - RNA, 20 nt, Artificial Sequence
  HTT spacer sequence TTCN PAM
auauguugccauggcaucag

SEQ ID NO: 31949 - RNA, 20 nt, Artificial Sequence
  HTT spacer sequence TTCN PAM
cacagcucauuauaagcuaa

SEQ ID NO: 31950 - RNA, 20 nt, Artificial Sequence
  HTT spacer sequence TTCN PAM
uugccaucuugguuuuggug

SEQ ID NO: 31951 - RNA, 20 nt, Artificial Sequence
  HTT spacer sequence TTCN PAM
uuacugcaaccuguuuuauc

SEQ ID NO: 31952 - RNA, 20 nt, Artificial Sequence
  HTT spacer sequence TTCN PAM
uagucacaggaugagguagg

SEQ ID NO: 31953 - RNA, 20 nt, Artificial Sequence
  HTT spacer sequence TTCN PAM
caggagguuaggcauucaua

SEQ ID NO: 31954 - RNA, 20 nt, Artificial Sequence
  HTT spacer sequence TTCN PAM
agaugaaguuguucugguuc

SEQ ID NO: 31955 - RNA, 20 nt, Artificial Sequence
  HTT spacer sequence TTCN PAM
ucuugaauaggggcggggua

SEQ ID NO: 31956 - RNA, 20 nt, Artificial Sequence
  HTT spacer sequence TTCN PAM
gguuccaacgccucugacau

SEQ ID NO: 31957 - RNA, 20 nt, Artificial Sequence
  HTT spacer sequence TTCN PAM
aacgccucugacauauuagc

SEQ ID NO: 31958 - RNA, 20 nt, Artificial Sequence
  HTT spacer sequence TTCN PAM
uuuuuuuuuuuccuuuuaaa

SEQ ID NO: 31959 - RNA, 20 nt, Artificial Sequence
  HTT spacer sequence TTCN PAM
uuuuaaauggggucuugcuc

SEQ ID NO: 31960 - RNA, 20 nt, Artificial Sequence
  HTT spacer sequence TTCN PAM
agcgauucucuugccucagc

SEQ ID NO: 31961 - RNA, 20 nt, Artificial Sequence
  HTT spacer sequence TTCN PAM
cuugccucagccucccgagu

SEQ ID NO: 31962 - RNA, 20 nt, Artificial Sequence
  HTT spacer sequence TTCN PAM
ccauguugcccaggcugauc

SEQ ID NO: 31963 - RNA, 20 nt, Artificial Sequence
  HTT spacer sequence TTCN PAM
acuuguuaaacugaaaacug

SEQ ID NO: 31964 - RNA, 20 nt, Artificial Sequence
  HTT spacer sequence TTCN PAM
guuuaacaaguggaaaugua

SEQ ID NO: 31965 - RNA, 20 nt, Artificial Sequence
  HTT spacer sequence TTCN PAM
cgggccaguuuucaguuuaa

SEQ ID NO: 31966 - RNA, 20 nt, Artificial Sequence
  HTT spacer sequence TTCN PAM
guacugccauccuugcgucc

SEQ ID NO: 31967 - RNA, 20 nt, Artificial Sequence
  HTT spacer sequence TTCN PAM
ucugcaaggacgcaaggaug

SEQ ID NO: 31968 - RNA, 20 nt, Artificial Sequence
  HTT spacer sequence TTCN PAM
gucugccuaccuacuaugcu

SEQ ID NO: 31969 - RNA, 20 nt, Artificial Sequence
  HTT spacer sequence TTCN PAM
guaacaacagcugugucuca

SEQ ID NO: 31970 - RNA, 20 nt, Artificial Sequence
  HTT spacer sequence TTCN PAM
ugcagccagacuucaaccac

SEQ ID NO: 31971 - RNA, 20 nt, Artificial Sequence
  HTT spacer sequence TTCN PAM
accacucacaggccgcaaac

SEQ ID NO: 31972 - RNA, 20 nt, Artificial Sequence
  HTT spacer sequence TTCN PAM
aacuguguucggagaaggcg

SEQ ID NO: 31973 - RNA, 20 nt, Artificial Sequence
  HTT spacer sequence TTCN PAM
gagaaggcgaauucaucugg

SEQ ID NO: 31974 - RNA, 20 nt, Artificial Sequence
  HTT spacer sequence TTCN PAM
ccgaacacaguuugaacagu

SEQ ID NO: 31975 - RNA, 20 nt, Artificial Sequence
  HTT spacer sequence TTCN PAM
ccuucuccgaacacaguuug

SEQ ID NO: 31976 - RNA, 20 nt, Artificial Sequence
  HTT spacer sequence TTCN PAM
ucuggcuguuaacgugccuc

SEQ ID NO: 31977 - RNA, 20 nt, Artificial Sequence
  HTT spacer sequence TTCN PAM
gcuuucuguggccacuuucc

SEQ ID NO: 31978 - RNA, 20 nt, Artificial Sequence
  HTT spacer sequence TTCN PAM
guggccacuuucccuuuucu

SEQ ID NO: 31979 - RNA, 20 nt, Artificial Sequence
  HTT spacer sequence TTCN PAM
cuuuucuguccauaaauuug

SEQ ID NO: 31980 - RNA, 20 nt, Artificial Sequence
  HTT spacer sequence TTCN PAM
guccauaaauuugcuuugac

SEQ ID NO: 31981 - RNA, 20 nt, Artificial Sequence
  HTT spacer sequence TTCN PAM
gggagacucuagggaugcug

SEQ ID NO: 31982 - RNA, 20 nt, Artificial Sequence
  HTT spacer sequence TTCN PAM
gggaccugcaccauuuguga

SEQ ID NO: 31983 - RNA, 20 nt, Artificial Sequence
  HTT spacer sequence TTCN PAM
caaauggugcaggucccaga

SEQ ID NO: 31984 - RNA, 20 nt, Artificial Sequence
  HTT spacer sequence TTCN PAM
uugaucagcuaaacucuguu

SEQ ID NO: 31985 - RNA, 20 nt, Artificial Sequence
  HTT spacer sequence TTCN PAM
auucaauuuguuggaaguuu

SEQ ID NO: 31986 - RNA, 20 nt, Artificial Sequence
  HTT spacer sequence TTCN PAM
auuuguuggaaguuuuuaac

SEQ ID NO: 31987 - RNA, 20 nt, Artificial Sequence
  HTT spacer sequence TTCN PAM
aacaaauugaauugaacaga

SEQ ID NO: 31988 - RNA, 20 nt, Artificial Sequence
  HTT spacer sequence TTCN PAM
aauuucuccacuuccucaua

SEQ ID NO: 31989 - RNA, 20 nt, Artificial Sequence
  HTT spacer sequence TTCN PAM
ccacuuccucauaaauaagu

SEQ ID NO: 31990 - RNA, 20 nt, Artificial Sequence
  HTT spacer sequence TTCN PAM
ucauaaauaagucauuuuaa

SEQ ID NO: 31991 - RNA, 20 nt, Artificial Sequence
  HTT spacer sequence TTCN PAM
guauuccaauauuuggaagu

SEQ ID NO: 31992 - RNA, 20 nt, Artificial Sequence
  HTT spacer sequence TTCN PAM
aauauuuggaaguauuaaug

SEQ ID NO: 31993 - RNA, 20 nt, Artificial Sequence
  HTT spacer sequence TTCN PAM
aaauauuggaauacugaaaa

SEQ ID NO: 31994 - RNA, 20 nt, Artificial Sequence
  HTT spacer sequence TTCN PAM
accaauuuucuauuuuugga

SEQ ID NO: 31995 - RNA, 20 nt, Artificial Sequence
  HTT spacer sequence TTCN PAM
auuuuuggacauugagguug

SEQ ID NO: 31996 - RNA, 20 nt, Artificial Sequence
  HTT spacer sequence TTCN PAM
uuuuuuuuuucuuuuuuuga

SEQ ID NO: 31997 - RNA, 20 nt, Artificial Sequence
  HTT spacer sequence TTCN PAM
uuuuuugagacagagucucg

SEQ ID NO: 31998 - RNA, 20 nt, Artificial Sequence
  HTT spacer sequence TTCN PAM
ccauguuggucaggcugguc

SEQ ID NO: 31999 - RNA, 20 nt, Artificial Sequence
  HTT spacer sequence TTCN PAM
ugauauuaauguugcuuuaa

SEQ ID NO: 32000 - RNA, 20 nt, Artificial Sequence
  HTT spacer sequence TTCN PAM
uucugucacccaggcuggag

SEQ ID NO: 32001 - RNA, 20 nt, Artificial Sequence
  HTT spacer sequence TTCN PAM
gucacccaggcuggaguuca

SEQ ID NO: 32002 - RNA, 20 nt, Artificial Sequence
  HTT spacer sequence TTCN PAM
guggcgugaucucagcucac

SEQ ID NO: 32003 - RNA, 20 nt, Artificial Sequence
  HTT spacer sequence TTCN PAM
agugauucuccugcgucggu

SEQ ID NO: 32004 - RNA, 20 nt, Artificial Sequence
  HTT spacer sequence TTCN PAM
ccugcgucggucuccugagu

SEQ ID NO: 32005 - RNA, 20 nt, Artificial Sequence
  HTT spacer sequence TTCN PAM
ugggucuuucgaugguuauu

SEQ ID NO: 32006 - RNA, 20 nt, Artificial Sequence
  HTT spacer sequence TTCN PAM
augguuauuuaauacuuccc

SEQ ID NO: 32007 - RNA, 20 nt, Artificial Sequence
  HTT spacer sequence TTCN PAM
cuacaguaaugcccugugcg

SEQ ID NO: 32008 - RNA, 20 nt, Artificial Sequence
  HTT spacer sequence TTCN PAM
ucacacuuagcauguacgca

SEQ ID NO: 32009 - RNA, 20 nt, Artificial Sequence
  HTT spacer sequence TTCN PAM
aaagauuuaacugugccaac

SEQ ID NO: 32010 - RNA, 20 nt, Artificial Sequence
  HTT spacer sequence TTCN PAM
gaaaagugauaggaggucau

SEQ ID NO: 32011 - RNA, 20 nt, Artificial Sequence
  HTT spacer sequence TTCN PAM
gaagagugacuuggcaaugu

SEQ ID NO: 32012 - RNA, 20 nt, Artificial Sequence
  HTT spacer sequence TTCN PAM
uaaaauugcuaugaccuccu

SEQ ID NO: 32013 - RNA, 20 nt, Artificial Sequence
  HTT spacer sequence TTCN PAM
acauuuccuuacuaaucucg

SEQ ID NO: 32014 - RNA, 20 nt, Artificial Sequence
  HTT spacer sequence TTCN PAM
uuacuaaucucgguuggugu

SEQ ID NO: 32015 - RNA, 20 nt, Artificial Sequence
  HTT spacer sequence TTCN PAM
aucuuuccucacacuuuucu

SEQ ID NO: 32016 - RNA, 20 nt, Artificial Sequence
  HTT spacer sequence TTCN PAM
ucacacuuuucuuggguuuu

SEQ ID NO: 32017 - RNA, 20 nt, Artificial Sequence
  HTT spacer sequence TTCN PAM
uggguuuuuccugaaucaug

SEQ ID NO: 32018 - RNA, 20 nt, Artificial Sequence
  HTT spacer sequence TTCN PAM
ugaaucaugagucuacuaca

SEQ ID NO: 32019 - RNA, 20 nt, Artificial Sequence
  HTT spacer sequence TTCN PAM
ggaaaaacccaagaaaagug

SEQ ID NO: 32020 - RNA, 20 nt, Artificial Sequence
  HTT spacer sequence TTCN PAM
aaagaugcuuuaaaaugugu

SEQ ID NO: 32021 - RNA, 20 nt, Artificial Sequence
  HTT spacer sequence TTCN PAM
accucugaaaccccaaaauu

SEQ ID NO: 32022 - RNA, 20 nt, Artificial Sequence
  HTT spacer sequence TTCN PAM
gagguggaaggaucacuuga

SEQ ID NO: 32023 - RNA, 20 nt, Artificial Sequence
  HTT spacer sequence TTCN PAM
caaauuuugggguuucagag

SEQ ID NO: 32024 - RNA, 20 nt, Artificial Sequence
  HTT spacer sequence TTCN PAM
aaauuaaaugagaccuuucu

SEQ ID NO: 32025 - RNA, 20 nt, Artificial Sequence
  HTT spacer sequence TTCN PAM
uuuuaacucguauaucauca

SEQ ID NO: 32026 - RNA, 20 nt, Artificial Sequence
  HTT spacer sequence TTCN PAM
uacccucaguaucugccuaa

SEQ ID NO: 32027 - RNA, 20 nt, Artificial Sequence
  HTT spacer sequence TTCN PAM
uuucaaugaaaagcagcccc

SEQ ID NO: 32028 - RNA, 20 nt, Artificial Sequence
  HTT spacer sequence TTCN PAM
augaaaagcagcccccaagc

SEQ ID NO: 32029 - RNA, 20 nt, Artificial Sequence
  HTT spacer sequence TTCN PAM
uugaaaagaaaaccuuaccg

SEQ ID NO: 32030 - RNA, 20 nt, Artificial Sequence
  HTT spacer sequence TTCN PAM
uuucuaacaaagagcagccu

SEQ ID NO: 32031 - RNA, 20 nt, Artificial Sequence
  HTT spacer sequence TTCN PAM
aacaaagagcagccuguaaa

SEQ ID NO: 32032 - RNA, 20 nt, Artificial Sequence
  HTT spacer sequence TTCN PAM
agcuugcuuguguaugucug

SEQ ID NO: 32033 - RNA, 20 nt, Artificial Sequence
  HTT spacer sequence TTCN PAM
ccugugcaagcuuccagcuu

SEQ ID NO: 32034 - RNA, 20 nt, Artificial Sequence
  HTT spacer sequence TTCN PAM
uauuggcacagcugccagca

SEQ ID NO: 32035 - RNA, 20 nt, Artificial Sequence
  HTT spacer sequence TTCN PAM
cuuuccuugucaaccaugug

SEQ ID NO: 32036 - RNA, 20 nt, Artificial Sequence
  HTT spacer sequence TTCN PAM
uugucaaccaugugcacagu

SEQ ID NO: 32037 - RNA, 20 nt, Artificial Sequence
  HTT spacer sequence TTCN PAM
uugcaugcuauguaaacauu

SEQ ID NO: 32038 - RNA, 20 nt, Artificial Sequence
  HTT spacer sequence TTCN PAM
gccgcaggcuggaagaccca

SEQ ID NO: 32039 - RNA, 20 nt, Artificial Sequence
  HTT spacer sequence TTCN PAM
agccugcggcagaauggaca

SEQ ID NO: 32040 - RNA, 20 nt, Artificial Sequence
  HTT spacer sequence TTCN PAM
uuuuucucuuucuuucaccu

SEQ ID NO: 32041 - RNA, 20 nt, Artificial Sequence
  HTT spacer sequence TTCN PAM
cuuucuuucaccuauuaaag

SEQ ID NO: 32042 - RNA, 20 nt, Artificial Sequence
  HTT spacer sequence TTCN PAM
uucaccuauuaaagcuccac

SEQ ID NO: 32043 - RNA, 20 nt, Artificial Sequence
  HTT spacer sequence TTCN PAM
ccuauuaaagcuccacucuu

SEQ ID NO: 32044 - RNA, 20 nt, Artificial Sequence
  HTT spacer sequence TTCN PAM
ugauuuccuuggcaugaggc

SEQ ID NO: 32045 - RNA, 20 nt, Artificial Sequence
  HTT spacer sequence TTCN PAM
uuggcaugaggcaaugaacc

SEQ ID NO: 32046 - RNA, 20 nt, Artificial Sequence
  HTT spacer sequence TTCN PAM
uugccucaugccaaggaaau

SEQ ID NO: 32047 - RNA, 20 nt, Artificial Sequence
  HTT spacer sequence TTCN PAM
gggguaauacccaagguuca

SEQ ID NO: 32048 - RNA, 20 nt, Artificial Sequence
  HTT spacer sequence TTCN PAM
gugacacagccucaggaaau

SEQ ID NO: 32049 - RNA, 20 nt, Artificial Sequence
  HTT spacer sequence TTCN PAM
ugaggcugugucacugaagu

SEQ ID NO: 32050 - RNA, 20 nt, Artificial Sequence
  HTT spacer sequence TTCN PAM
caagauggucggggcacagc

SEQ ID NO: 32051 - RNA, 20 nt, Artificial Sequence
  HTT spacer sequence TTCN PAM
uauauguaagaaguacauug

SEQ ID NO: 32052 - RNA, 20 nt, Artificial Sequence
  HTT spacer sequence TTCN PAM
uacauauaugaauugacguc

SEQ ID NO: 32053 - RNA, 20 nt, Artificial Sequence
  HTT spacer sequence TTCN PAM
guccagaaaggcggggacaa

SEQ ID NO: 32054 - RNA, 20 nt, Artificial Sequence
  HTT spacer sequence TTCN PAM
ggacggaaccaauguacuuc

SEQ ID NO: 32055 - RNA, 20 nt, Artificial Sequence
  HTT spacer sequence TTCN PAM
aggucacagguagacaaaug

SEQ ID NO: 32056 - RNA, 20 nt, Artificial Sequence
  HTT spacer sequence TTCN PAM
uuugaaucuccgauaagccu

SEQ ID NO: 32057 - RNA, 20 nt, Artificial Sequence
  HTT spacer sequence TTCN PAM
aaagaaugcaaccauuuguc

SEQ ID NO: 32058 - RNA, 20 nt, Artificial Sequence
  HTT spacer sequence TTCN PAM
aaaggaggcaaucagaauau

SEQ ID NO: 32059 - RNA, 20 nt, Artificial Sequence
  HTT spacer sequence TTCN PAM
gauugccuccuuuggaaagg

SEQ ID NO: 32060 - RNA, 20 nt, Artificial Sequence
  HTT spacer sequence TTCN PAM
ccauguuggccgggcugcuc

SEQ ID NO: 32061 - RNA, 20 nt, Artificial Sequence
  HTT spacer sequence TTCN PAM
ccugccucagccucccgagu

SEQ ID NO: 32062 - RNA, 20 nt, Artificial Sequence
  HTT spacer sequence TTCN PAM
agcuauucuccugccucagc

SEQ ID NO: 32063 - RNA, 20 nt, Artificial Sequence
  HTT spacer sequence TTCN PAM
ggguucaagcuauucuccug

SEQ ID NO: 32064 - RNA, 20 nt, Artificial Sequence
  HTT spacer sequence TTCN PAM
uucuggguucaagcuauucu

SEQ ID NO: 32065 - RNA, 20 nt, Artificial Sequence
  HTT spacer sequence TTCN PAM
cucuuguugcccaggcugga

SEQ ID NO: 32066 - RNA, 20 nt, Artificial Sequence
  HTT spacer sequence TTCN PAM
gagauggaguuucacucuug

SEQ ID NO: 32067 - RNA, 20 nt, Artificial Sequence
  HTT spacer sequence TTCN PAM
caaagugcugggauuacagg

SEQ ID NO: 32068 - RNA, 20 nt, Artificial Sequence
  HTT spacer sequence TTCN PAM
ucauguuagccaggaugguc

SEQ ID NO: 32069 - RNA, 20 nt, Artificial Sequence
  HTT spacer sequence TTCN PAM
ccugccucagccugccgagu

SEQ ID NO: 32070 - RNA, 20 nt, Artificial Sequence
  HTT spacer sequence TTCN PAM
cgccauucuccugccucagc

SEQ ID NO: 32071 - RNA, 20 nt, Artificial Sequence
  HTT spacer sequence TTCN PAM
cucucucuuuuuuuuuuuuu

SEQ ID NO: 32072 - RNA, 20 nt, Artificial Sequence
  HTT spacer sequence TTCN PAM
gcucacugagauagaugcau

SEQ ID NO: 32073 - RNA, 20 nt, Artificial Sequence
  HTT spacer sequence TTCN PAM
aagucauccuucugcucacu

SEQ ID NO: 32074 - RNA, 20 nt, Artificial Sequence
  HTT spacer sequence TTCN PAM
auucaaagucauccuucugc

SEQ ID NO: 32075 - RNA, 20 nt, Artificial Sequence
  HTT spacer sequence TTCN PAM
uagcuugaacuuccccuuua

SEQ ID NO: 32076 - RNA, 20 nt, Artificial Sequence
  HTT spacer sequence TTCN PAM
agcuaggaacugcucccauu

SEQ ID NO: 32077 - RNA, 20 nt, Artificial Sequence
  HTT spacer sequence TTCN PAM
ccuuuagcuucagugauuug

SEQ ID NO: 32078 - RNA, 20 nt, Artificial Sequence
  HTT spacer sequence TTCN PAM
gugauuugggggcucaaggu

SEQ ID NO: 32079 - RNA, 20 nt, Artificial Sequence
  HTT spacer sequence TTCN PAM
uuucacauaccucagccucc

SEQ ID NO: 32080 - RNA, 20 nt, Artificial Sequence
  HTT spacer sequence TTCN PAM
cauaccucagccucccaagu

SEQ ID NO: 32081 - RNA, 20 nt, Artificial Sequence
  HTT spacer sequence TTCN PAM
uacaaaaaaaauaaaacauu

SEQ ID NO: 32082 - RNA, 20 nt, Artificial Sequence
  HTT spacer sequence TTCN PAM
ggaggcugaggcgggaggac

SEQ ID NO: 32083 - RNA, 20 nt, Artificial Sequence
  HTT spacer sequence TTCN PAM
aaguucccucuccaaaaccu

SEQ ID NO: 32084 - RNA, 20 nt, Artificial Sequence
  HTT spacer sequence TTCN PAM
cucuccaaaaccucaugguu

SEQ ID NO: 32085 - RNA, 20 nt, Artificial Sequence
  HTT spacer sequence TTCN PAM
cuguucucauccccugcacc

SEQ ID NO: 32086 - RNA, 20 nt, Artificial Sequence
  HTT spacer sequence TTCN PAM
cauccccugcacccucccuu

SEQ ID NO: 32087 - RNA, 20 nt, Artificial Sequence
  HTT spacer sequence TTCN PAM
ccuggaguacucaccuggcc

SEQ ID NO: 32088 - RNA, 20 nt, Artificial Sequence
  HTT spacer sequence TTCN PAM
auucuaggcacagcauguga

SEQ ID NO: 32089 - RNA, 20 nt, Artificial Sequence
  HTT spacer sequence TTCN PAM
aggcacagcaugugaugagc

SEQ ID NO: 32090 - RNA, 20 nt, Artificial Sequence
  HTT spacer sequence TTCN PAM
ccgccuugacagugagaaag

SEQ ID NO: 32091 - RNA, 20 nt, Artificial Sequence
  HTT spacer sequence TTCN PAM
cacugucaaggcggugaagc

SEQ ID NO: 32092 - RNA, 20 nt, Artificial Sequence
  HTT spacer sequence TTCN PAM
gcucauucucgaagucucaa

SEQ ID NO: 32093 - RNA, 20 nt, Artificial Sequence
  HTT spacer sequence TTCN PAM
cgaagucucaaacuucacuu

SEQ ID NO: 32094 - RNA, 20 nt, Artificial Sequence
  HTT spacer sequence TTCN PAM
agaaugagccgaagggagac

SEQ ID NO: 32095 - RNA, 20 nt, Artificial Sequence
  HTT spacer sequence TTCN PAM
cuucuccugugcgcugauuc

SEQ ID NO: 32096 - RNA, 20 nt, Artificial Sequence
  HTT spacer sequence TTCN PAM
ccugugcgcugauucugaau

SEQ ID NO: 32097 - RNA, 20 nt, Artificial Sequence
  HTT spacer sequence TTCN PAM
gaauucagcccccguccaag

SEQ ID NO: 32098 - RNA, 20 nt, Artificial Sequence
  HTT spacer sequence TTCN PAM
gaaucagcgcacaggagaag

SEQ ID NO: 32099 - RNA, 20 nt, Artificial Sequence
  HTT spacer sequence TTCN PAM
gcccccguccaagguccugg

SEQ ID NO: 32100 - RNA, 20 nt, Artificial Sequence
  HTT spacer sequence TTCN PAM
cuucugcuuggcguguuguu

SEQ ID NO: 32101 - RNA, 20 nt, Artificial Sequence
  HTT spacer sequence TTCN PAM
gcuuggcguguuguucauca

SEQ ID NO: 32102 - RNA, 20 nt, Artificial Sequence
  HTT spacer sequence TTCN PAM
ucaccacugugcacugcuga

SEQ ID NO: 32103 - RNA, 20 nt, Artificial Sequence
  HTT spacer sequence TTCN PAM
cuggaccucugcuuuaucau

SEQ ID NO: 32104 - RNA, 20 nt, Artificial Sequence
  HTT spacer sequence TTCN PAM
aaugauaaagcagaggucca

SEQ ID NO: 32105 - RNA, 20 nt, Artificial Sequence
  HTT spacer sequence TTCN PAM
cacgacauuccuuucacuuc

SEQ ID NO: 32106 - RNA, 20 nt, Artificial Sequence
  HTT spacer sequence TTCN PAM
uuucacuucucacuuggaag

SEQ ID NO: 32107 - RNA, 20 nt, Artificial Sequence
  HTT spacer sequence TTCN PAM
cuucucacuuggaagaugag

SEQ ID NO: 32108 - RNA, 20 nt, Artificial Sequence
  HTT spacer sequence TTCN PAM
cacuuggaagaugagccgug

SEQ ID NO: 32109 - RNA, 20 nt, Artificial Sequence
  HTT spacer sequence TTCN PAM
aagugagaagugaaaggaau

SEQ ID NO: 32110 - RNA, 20 nt, Artificial Sequence
  HTT spacer sequence TTCN PAM
ucacggcucaucuuccaagu

SEQ ID NO: 32111 - RNA, 20 nt, Artificial Sequence
  HTT spacer sequence TTCN PAM
gcuugacuugagggccaagc

SEQ ID NO: 32112 - RNA, 20 nt, Artificial Sequence
  HTT spacer sequence TTCN PAM
uauuuaaaaccauggcuugc

SEQ ID NO: 32113 - RNA, 20 nt, Artificial Sequence
  HTT spacer sequence TTCN PAM
uucuuauuuaaaaccauggc

SEQ ID NO: 32114 - RNA, 20 nt, Artificial Sequence
  HTT spacer sequence TTCN PAM
aaccuucaucuucuaguaag

SEQ ID NO: 32115 - RNA, 20 nt, Artificial Sequence
  HTT spacer sequence TTCN PAM
ucuucuaguaaggaaacaag

SEQ ID NO: 32116 - RNA, 20 nt, Artificial Sequence
  HTT spacer sequence TTCN PAM
aguaaggaaacaagugggcu

SEQ ID NO: 32117 - RNA, 20 nt, Artificial Sequence
  HTT spacer sequence TTCN PAM
uuacuagaagaugaagguua

SEQ ID NO: 32118 - RNA, 20 nt, Artificial Sequence
  HTT spacer sequence TTCN PAM
ugcucaggaaagaccuaugu

SEQ ID NO: 32119 - RNA, 20 nt, Artificial Sequence
  HTT spacer sequence TTCN PAM
ugagcaagaacucuaaagcc

SEQ ID NO: 32120 - RNA, 20 nt, Artificial Sequence
  HTT spacer sequence TTCN PAM
ugauccuccuccccaggcca

SEQ ID NO: 32121 - RNA, 20 nt, Artificial Sequence
  HTT spacer sequence TTCN PAM
ugacauucauagucuaguua

SEQ ID NO: 32122 - RNA, 20 nt, Artificial Sequence
  HTT spacer sequence TTCN PAM
uagucuaguuacacgauccc

SEQ ID NO: 32123 - RNA, 20 nt, Artificial Sequence
  HTT spacer sequence TTCN PAM
acugacccuuacagggaucg

SEQ ID NO: 32124 - RNA, 20 nt, Artificial Sequence
  HTT spacer sequence TTCN PAM
uuuguagcacuuacuucaac

SEQ ID NO: 32125 - RNA, 20 nt, Artificial Sequence
  HTT spacer sequence TTCN PAM
uucauggggagggauaugga

SEQ ID NO: 32126 - RNA, 20 nt, Artificial Sequence
  HTT spacer sequence TTCN PAM
uggggagggauauggaucag

SEQ ID NO: 32127 - RNA, 20 nt, Artificial Sequence
  HTT spacer sequence TTCN PAM
gucccgagggaaagaaaguc

SEQ ID NO: 32128 - RNA, 20 nt, Artificial Sequence
  HTT spacer sequence TTCN PAM
cucgggacugaaacaccucu

SEQ ID NO: 32129 - RNA, 20 nt, Artificial Sequence
  HTT spacer sequence TTCN PAM
uucccucgggacugaaacac

SEQ ID NO: 32130 - RNA, 20 nt, Artificial Sequence
  HTT spacer sequence TTCN PAM
uguaggacgacagagauggc

SEQ ID NO: 32131 - RNA, 20 nt, Artificial Sequence
  HTT spacer sequence TTCN PAM
gagccccugggggugcagua

SEQ ID NO: 32132 - RNA, 20 nt, Artificial Sequence
  HTT spacer sequence TTCN PAM
gcaugccuggccagugcaga

SEQ ID NO: 32133 - RNA, 20 nt, Artificial Sequence
  HTT spacer sequence TTCN PAM
guucaguagcacuggacaga

SEQ ID NO: 32134 - RNA, 20 nt, Artificial Sequence
  HTT spacer sequence TTCN PAM
guagcacuggacagaaggcc

SEQ ID NO: 32135 - RNA, 20 nt, Artificial Sequence
  HTT spacer sequence TTCN PAM
guccagugcuacugaacaga

SEQ ID NO: 32136 - RNA, 20 nt, Artificial Sequence
  HTT spacer sequence TTCN PAM
ugagacagcaccauuucugg

SEQ ID NO: 32137 - RNA, 20 nt, Artificial Sequence
  HTT spacer sequence TTCN PAM
gggaagagagucaccuggga

SEQ ID NO: 32138 - RNA, 20 nt, Artificial Sequence
  HTT spacer sequence TTCN PAM
cagaaauggugcugucucaa

SEQ ID NO: 32139 - RNA, 20 nt, Artificial Sequence
  HTT spacer sequence TTCN PAM
ccuccaagccggagcguggc

SEQ ID NO: 32140 - RNA, 20 nt, Artificial Sequence
  HTT spacer sequence TTCN PAM
ugcagcagccccucucuuca

SEQ ID NO: 32141 - RNA, 20 nt, Artificial Sequence
  HTT spacer sequence TTCN PAM
uucuugcagcagccccucuc

SEQ ID NO: 32142 - RNA, 20 nt, Artificial Sequence
  HTT spacer sequence TTCN PAM
ugaccagccugggcaacaca

SEQ ID NO: 32143 - RNA, 20 nt, Artificial Sequence
  HTT spacer sequence TTCN PAM
caccucagccuccccaagcg

SEQ ID NO: 32144 - RNA, 20 nt, Artificial Sequence
  HTT spacer sequence TTCN PAM
ccaccauccccuccauaaaa

SEQ ID NO: 32145 - RNA, 20 nt, Artificial Sequence
  HTT spacer sequence TTCN PAM
uaccacccacaaccuucacc

SEQ ID NO: 32146 - RNA, 20 nt, Artificial Sequence
  HTT spacer sequence TTCN PAM
uacuauuucauaccacccac

SEQ ID NO: 32147 - RNA, 20 nt, Artificial Sequence
  HTT spacer sequence TTCN PAM
ugccacagagcuccuaaaau

SEQ ID NO: 32148 - RNA, 20 nt, Artificial Sequence
  HTT spacer sequence TTCN PAM
caggauuuuaggagcucugu

SEQ ID NO: 32149 - RNA, 20 nt, Artificial Sequence
  HTT spacer sequence TTCN PAM
ugggugagcaucuuuuguuc

SEQ ID NO: 32150 - RNA, 20 nt, Artificial Sequence
  HTT spacer sequence TTCN PAM
aaugaggugacucuuggugg

SEQ ID NO: 32151 - RNA, 20 nt, Artificial Sequence
  HTT spacer sequence TTCN PAM
cuccuauccaggagccacca

SEQ ID NO: 32152 - RNA, 20 nt, Artificial Sequence
  HTT spacer sequence TTCN PAM
ggugauucacuccuauccag

SEQ ID NO: 32153 - RNA, 20 nt, Artificial Sequence
  HTT spacer sequence TTCN PAM
aacucuggcuugaucuuucu

SEQ ID NO: 32154 - RNA, 20 nt, Artificial Sequence
  HTT spacer sequence TTCN PAM
gcuucuaacucuggcuugau

SEQ ID NO: 32155 - RNA, 20 nt, Artificial Sequence
  HTT spacer sequence TTCN PAM
uguguuauagccagcacuuu

SEQ ID NO: 32156 - RNA, 20 nt, Artificial Sequence
  HTT spacer sequence TTCN PAM
agugauucuccugccucagc

SEQ ID NO: 32157 - RNA, 20 nt, Artificial Sequence
  HTT spacer sequence TTCN PAM
ccugccucagccuccugagc

SEQ ID NO: 32158 - RNA, 20 nt, Artificial Sequence
  HTT spacer sequence TTCN PAM
ccauauuaaccaggcuggcc

SEQ ID NO: 32159 - RNA, 20 nt, Artificial Sequence
  HTT spacer sequence TTCN PAM
uaaaagaaucaacuaacuaa

SEQ ID NO: 32160 - RNA, 20 nt, Artificial Sequence
  HTT spacer sequence TTCN PAM
uuuaagaacaaugucuuuug

SEQ ID NO: 32161 - RNA, 20 nt, Artificial Sequence
  HTT spacer sequence TTCN PAM
uaauuagguuagauuuuuau

SEQ ID NO: 32162 - RNA, 20 nt, Artificial Sequence
  HTT spacer sequence TTCN PAM
aggggagaaaaaucauguaa

SEQ ID NO: 32163 - RNA, 20 nt, Artificial Sequence
  HTT spacer sequence TTCN PAM
ccccuugaaauuaauuuuug

SEQ ID NO: 32164 - RNA, 20 nt, Artificial Sequence
  HTT spacer sequence TTCN PAM
cucuuuacaugauuuuucuc

SEQ ID NO: 32165 - RNA, 20 nt, Artificial Sequence
  HTT spacer sequence TTCN PAM
uuaucuuucucucuuuacau

SEQ ID NO: 32166 - RNA, 20 nt, Artificial Sequence
  HTT spacer sequence TTCN PAM
gcaaaguauucauuaucuuu

SEQ ID NO: 32167 - RNA, 20 nt, Artificial Sequence
  HTT spacer sequence TTCN PAM
uaaauuucugcaaaguauuc

SEQ ID NO: 32168 - RNA, 20 nt, Artificial Sequence
  HTT spacer sequence TTCN PAM
uccaaguuuuauguuuaugu

SEQ ID NO: 32169 - RNA, 20 nt, Artificial Sequence
  HTT spacer sequence TTCN PAM
aggaaaacauaauuuaucaa

SEQ ID NO: 32170 - RNA, 20 nt, Artificial Sequence
  HTT spacer sequence TTCN PAM
uagaaaugcauuucauccaa

SEQ ID NO: 32171 - RNA, 20 nt, Artificial Sequence
  HTT spacer sequence TTCN PAM
auuuuacuugugguuaguuu

SEQ ID NO: 32172 - RNA, 20 nt, Artificial Sequence
  HTT spacer sequence TTCN PAM
agagaagaaguaaaguuguc

SEQ ID NO: 32173 - RNA, 20 nt, Artificial Sequence
  HTT spacer sequence TTCN PAM
cuugaaaauauccuauuuag

SEQ ID NO: 32174 - RNA, 20 nt, Artificial Sequence
  HTT spacer sequence TTCN PAM
ucucuugaaaauauccuauu

SEQ ID NO: 32175 - RNA, 20 nt, Artificial Sequence
  HTT spacer sequence TTCN PAM
aaaaaacaccaggcucaaac

SEQ ID NO: 32176 - RNA, 20 nt, Artificial Sequence
  HTT spacer sequence TTCN PAM
caugucagauuguuugagcc

SEQ ID NO: 32177 - RNA, 20 nt, Artificial Sequence
  HTT spacer sequence TTCN PAM
aaguuuuauuugcucucuaa

SEQ ID NO: 32178 - RNA, 20 nt, Artificial Sequence
  HTT spacer sequence TTCN PAM
agcccauucaaaguuuuauu

SEQ ID NO: 32179 - RNA, 20 nt, Artificial Sequence
  HTT spacer sequence TTCN PAM
agacucuagaaaaacaaaac

SEQ ID NO: 32180 - RNA, 20 nt, Artificial Sequence
  HTT spacer sequence TTCN PAM
agagucuggaauauuucaag

SEQ ID NO: 32181 - RNA, 20 nt, Artificial Sequence
  HTT spacer sequence TTCN PAM
caauucuuuuuauaaagcaa

SEQ ID NO: 32182 - RNA, 20 nt, Artificial Sequence
  HTT spacer sequence TTCN PAM
uuuuauaaagcaaguauaaa

SEQ ID NO: 32183 - RNA, 20 nt, Artificial Sequence
  HTT spacer sequence TTCN PAM
uaccaaucucuuuuaugaau

SEQ ID NO: 32184 - RNA, 20 nt, Artificial Sequence
  HTT spacer sequence TTCN PAM
uaaaagagauugguaugaag

SEQ ID NO: 32185 - RNA, 20 nt, Artificial Sequence
  HTT spacer sequence TTCN PAM
gucugguaauacuuuauuaa

SEQ ID NO: 32186 - RNA, 20 nt, Artificial Sequence
  HTT spacer sequence TTCN PAM
auaaugcauggaugguucaa

SEQ ID NO: 32187 - RNA, 20 nt, Artificial Sequence
  HTT spacer sequence TTCN PAM
auacaaggaaauucaguaac

SEQ ID NO: 32188 - RNA, 20 nt, Artificial Sequence
  HTT spacer sequence TTCN PAM
uuguauugaaccauccaugc

SEQ ID NO: 32189 - RNA, 20 nt, Artificial Sequence
  HTT spacer sequence TTCN PAM
guaacacaauauaauagauc

SEQ ID NO: 32190 - RNA, 20 nt, Artificial Sequence
  HTT spacer sequence TTCN PAM
caugaucuauuauauugugu

SEQ ID NO: 32191 - RNA, 20 nt, Artificial Sequence
  HTT spacer sequence TTCN PAM
uuggguauauucacaugauc

SEQ ID NO: 32192 - RNA, 20 nt, Artificial Sequence
  HTT spacer sequence TTCN PAM
uagaugcuguaaaggcauuu

SEQ ID NO: 32193 - RNA, 20 nt, Artificial Sequence
  HTT spacer sequence TTCN PAM
acaccuacuuuuuagguggu

SEQ ID NO: 32194 - RNA, 20 nt, Artificial Sequence
  HTT spacer sequence TTCN PAM
uuagcaugauaaaauauauu

SEQ ID NO: 32195 - RNA, 20 nt, Artificial Sequence
  HTT spacer sequence TTCN PAM
gggcugauaaauauauuuua

SEQ ID NO: 32196 - RNA, 20 nt, Artificial Sequence
  HTT spacer sequence TTCN PAM
cuccagcgugugcccuuauc

SEQ ID NO: 32197 - RNA, 20 nt, Artificial Sequence
  HTT spacer sequence TTCN PAM
uaauuuuaacauuauucccu

SEQ ID NO: 32198 - RNA, 20 nt, Artificial Sequence
  HTT spacer sequence TTCN PAM
uucuucuuuuuuuuuuuuga

SEQ ID NO: 32199 - RNA, 20 nt, Artificial Sequence
  HTT spacer sequence TTCN PAM
ucuuuuuuuuuuuugagacg

SEQ ID NO: 32200 - RNA, 20 nt, Artificial Sequence
  HTT spacer sequence TTCN PAM
uuuuuuuuuuugagacggag

SEQ ID NO: 32201 - RNA, 20 nt, Artificial Sequence
  HTT spacer sequence TTCN PAM
agcgauucuccugccucagc

SEQ ID NO: 32202 - RNA, 20 nt, Artificial Sequence
  HTT spacer sequence TTCN PAM
ccugccucagccucccgagu

SEQ ID NO: 32203 - RNA, 20 nt, Artificial Sequence
  HTT spacer sequence TTCN PAM
ccauguuggucaggcugguc

SEQ ID NO: 32204 - RNA, 20 nt, Artificial Sequence
  HTT spacer sequence TTCN PAM
agaccagccugaccaacaug

SEQ ID NO: 32205 - RNA, 20 nt, Artificial Sequence
  HTT spacer sequence TTCN PAM
acauuauccuuaauacugau

SEQ ID NO: 32206 - RNA, 20 nt, Artificial Sequence
  HTT spacer sequence TTCN PAM
acuuauuauggauuuaucua

SEQ ID NO: 32207 - RNA, 20 nt, Artificial Sequence
  HTT spacer sequence TTCN PAM
cagcuucacaagacaguauu

SEQ ID NO: 32208 - RNA, 20 nt, Artificial Sequence
  HTT spacer sequence TTCN PAM
caagacaguauuacguagca

SEQ ID NO: 32209 - RNA, 20 nt, Artificial Sequence
  HTT spacer sequence TTCN PAM
ccaggcuagugaugugcuac

SEQ ID NO: 32210 - RNA, 20 nt, Artificial Sequence
  HTT spacer sequence TTCN PAM
acuuugaucuuuccccaggc

SEQ ID NO: 32211 - RNA, 20 nt, Artificial Sequence
  HTT spacer sequence TTCN PAM
aauuuucaacuuugaucuuu

SEQ ID NO: 32212 - RNA, 20 nt, Artificial Sequence
  HTT spacer sequence TTCN PAM
auugaauguguacugcuuuu

SEQ ID NO: 32213 - RNA, 20 nt, Artificial Sequence
  HTT spacer sequence TTCN PAM
auggaaaccacacuucaaau

SEQ ID NO: 32214 - RNA, 20 nt, Artificial Sequence
  HTT spacer sequence TTCN PAM
acuaaaauuuuuugacuuga

SEQ ID NO: 32215 - RNA, 20 nt, Artificial Sequence
  HTT spacer sequence TTCN PAM
ggaggaacuuccauguacau

SEQ ID NO: 32216 - RNA, 20 nt, Artificial Sequence
  HTT spacer sequence TTCN PAM
uccugaaaauaaagaugguc

SEQ ID NO: 32217 - RNA, 20 nt, Artificial Sequence
  HTT spacer sequence TTCN PAM
auguacauugaugacggacg

SEQ ID NO: 32218 - RNA, 20 nt, Artificial Sequence
  HTT spacer sequence TTCN PAM
aucguccgucaucaauguac

SEQ ID NO: 32219 - RNA, 20 nt, Artificial Sequence
  HTT spacer sequence TTCN PAM
aucauccuaaugaacauaau

SEQ ID NO: 32220 - RNA, 20 nt, Artificial Sequence
  HTT spacer sequence TTCN PAM
uuaggaugauagaaacggau

SEQ ID NO: 32221 - RNA, 20 nt, Artificial Sequence
  HTT spacer sequence TTCN PAM
uuauguucauuaggaugaua

SEQ ID NO: 32222 - RNA, 20 nt, Artificial Sequence
  HTT spacer sequence TTCN PAM
gggcuggaagccagaagagg

SEQ ID NO: 32223 - RNA, 20 nt, Artificial Sequence
  HTT spacer sequence TTCN PAM
agccccgaaagcugcuuacu

SEQ ID NO: 32224 - RNA, 20 nt, Artificial Sequence
  HTT spacer sequence TTCN PAM
ggcuuccagccccgaaagcu

SEQ ID NO: 32225 - RNA, 20 nt, Artificial Sequence
  HTT spacer sequence TTCN PAM
gcuuugcggguauuugcuga

SEQ ID NO: 32226 - RNA, 20 nt, Artificial Sequence
  HTT spacer sequence TTCN PAM
agauaccuuguccagaucag

SEQ ID NO: 32227 - RNA, 20 nt, Artificial Sequence
  HTT spacer sequence TTCN PAM
agcgauucuccugccucagc

SEQ ID NO: 32228 - RNA, 20 nt, Artificial Sequence
  HTT spacer sequence TTCN PAM
ccugccucagccucccgagu

SEQ ID NO: 32229 - RNA, 20 nt, Artificial Sequence
  HTT spacer sequence TTCN PAM
ccauguuggccaggaugguc

SEQ ID NO: 32230 - RNA, 20 nt, Artificial Sequence
  HTT spacer sequence TTCN PAM
uuuuuaguccccuaugcuca

SEQ ID NO: 32231 - RNA, 20 nt, Artificial Sequence
  HTT spacer sequence TTCN PAM
uuuccacuuugggguccacu

SEQ ID NO: 32232 - RNA, 20 nt, Artificial Sequence
  HTT spacer sequence TTCN PAM
acuuugggguccacuuuggg

SEQ ID NO: 32233 - RNA, 20 nt, Artificial Sequence
  HTT spacer sequence TTCN PAM
ugggugggguggaccccaaa

SEQ ID NO: 32234 - RNA, 20 nt, Artificial Sequence
  HTT spacer sequence TTCN PAM
ucuugggugggguggacccc

SEQ ID NO: 32235 - RNA, 20 nt, Artificial Sequence
  HTT spacer sequence TTCN PAM
aagucauccuucuucuuggg

SEQ ID NO: 32236 - RNA, 20 nt, Artificial Sequence
  HTT spacer sequence TTCN PAM
gagcugguuuacuuccaagu

SEQ ID NO: 32237 - RNA, 20 nt, Artificial Sequence
  HTT spacer sequence TTCN PAM
uaucaaccacauccaguucc

SEQ ID NO: 32238 - RNA, 20 nt, Artificial Sequence
  HTT spacer sequence TTCN PAM
ucaaaacuggaacuuggauu

SEQ ID NO: 32239 - RNA, 20 nt, Artificial Sequence
  HTT spacer sequence TTCN PAM
aguuuugaggaacuggaugu

SEQ ID NO: 32240 - RNA, 20 nt, Artificial Sequence
  HTT spacer sequence TTCN PAM
agugucccaggagccuggca

SEQ ID NO: 32241 - RNA, 20 nt, Artificial Sequence
  HTT spacer sequence TTCN PAM
ggagaggauuuuuguuugca

SEQ ID NO: 32242 - RNA, 20 nt, Artificial Sequence
  HTT spacer sequence TTCN PAM
uccggagaggauuuuuguuu

SEQ ID NO: 32243 - RNA, 20 nt, Artificial Sequence
  HTT spacer sequence TTCN PAM
aaugacucucuaauaaauuu

SEQ ID NO: 32244 - RNA, 20 nt, Artificial Sequence
  HTT spacer sequence TTCN PAM
aauacaauguccagcacaca

SEQ ID NO: 32245 - RNA, 20 nt, Artificial Sequence
  HTT spacer sequence TTCN PAM
ugguaauuuguguuugugug

SEQ ID NO: 32246 - RNA, 20 nt, Artificial Sequence
  HTT spacer sequence TTCN PAM
cauccaucaggccucauauc

SEQ ID NO: 32247 - RNA, 20 nt, Artificial Sequence
  HTT spacer sequence TTCN PAM
gcuaauucccauccaucagg

SEQ ID NO: 32248 - RNA, 20 nt, Artificial Sequence
  HTT spacer sequence TTCN PAM
ggcaugagaaacauacccuc

SEQ ID NO: 32249 - RNA, 20 nt, Artificial Sequence
  HTT spacer sequence TTCN PAM
caugccugaaguuucugcua

SEQ ID NO: 32250 - RNA, 20 nt, Artificial Sequence
  HTT spacer sequence TTCN PAM
aggccucugaggguauguuu

SEQ ID NO: 32251 - RNA, 20 nt, Artificial Sequence
  HTT spacer sequence TTCN PAM
uaucuccauuaucuagacac

SEQ ID NO: 32252 - RNA, 20 nt, Artificial Sequence
  HTT spacer sequence TTCN PAM
cauguucaaagaggaaauuu

SEQ ID NO: 32253 - RNA, 20 nt, Artificial Sequence
  HTT spacer sequence TTCN PAM
aagaggaaauuugcaaaacu

SEQ ID NO: 32254 - RNA, 20 nt, Artificial Sequence
  HTT spacer sequence TTCN PAM
ucuuugaacaugggaaacau

SEQ ID NO: 32255 - RNA, 20 nt, Artificial Sequence
  HTT spacer sequence TTCN PAM
aguuuugcaaauuuccucuu

SEQ ID NO: 32256 - RNA, 20 nt, Artificial Sequence
  HTT spacer sequence TTCN PAM
ugccaacacuuucaaguuuu

SEQ ID NO: 32257 - RNA, 20 nt, Artificial Sequence
  HTT spacer sequence TTCN PAM
gauuuccugccaacacuuuc

SEQ ID NO: 32258 - RNA, 20 nt, Artificial Sequence
  HTT spacer sequence TTCN PAM
ggaccguaauuuauacugac

SEQ ID NO: 32259 - RNA, 20 nt, Artificial Sequence
  HTT spacer sequence TTCN PAM
gcaguuuucgggaccguaau

SEQ ID NO: 32260 - RNA, 20 nt, Artificial Sequence
  HTT spacer sequence TTCN PAM
agaacuuaaugguaaagcaa

SEQ ID NO: 32261 - RNA, 20 nt, Artificial Sequence
  HTT spacer sequence TTCN PAM
ggaauucugcaguuuucggg

SEQ ID NO: 32262 - RNA, 20 nt, Artificial Sequence
  HTT spacer sequence TTCN PAM
gcuguuaaacccuugcuuua

SEQ ID NO: 32263 - RNA, 20 nt, Artificial Sequence
  HTT spacer sequence TTCN PAM
auucugcuguuaaacccuug

SEQ ID NO: 32264 - RNA, 20 nt, Artificial Sequence
  HTT spacer sequence TTCN PAM
cucuggcuauuucuauucug

SEQ ID NO: 32265 - RNA, 20 nt, Artificial Sequence
  HTT spacer sequence TTCN PAM
uaguucucucuggcuauuuc

SEQ ID NO: 32266 - RNA, 20 nt, Artificial Sequence
  HTT spacer sequence TTCN PAM
ggguagugucaucugacuua

SEQ ID NO: 32267 - RNA, 20 nt, Artificial Sequence
  HTT spacer sequence TTCN PAM
uuggccucucagugccuuau

SEQ ID NO: 32268 - RNA, 20 nt, Artificial Sequence
  HTT spacer sequence TTCN PAM
auuccuuggccucucagugc

SEQ ID NO: 32269 - RNA, 20 nt, Artificial Sequence
  HTT spacer sequence TTCN PAM
gcauuuuccauuccuuggcc

SEQ ID NO: 32270 - RNA, 20 nt, Artificial Sequence
  HTT spacer sequence TTCN PAM
ucugcauuuuccauuccuug

SEQ ID NO: 32271 - RNA, 20 nt, Artificial Sequence
  HTT spacer sequence TTCN PAM
cucucucccugguacuccaa

SEQ ID NO: 32272 - RNA, 20 nt, Artificial Sequence
  HTT spacer sequence TTCN PAM
ccuucucucucucccuggua

SEQ ID NO: 32273 - RNA, 20 nt, Artificial Sequence
  HTT spacer sequence TTCN PAM
ucuccuucucucucucccug

SEQ ID NO: 32274 - RNA, 20 nt, Artificial Sequence
  HTT spacer sequence TTCN PAM
guucuucuccuucucucucu

SEQ ID NO: 32275 - RNA, 20 nt, Artificial Sequence
  HTT spacer sequence TTCN PAM
aggacggugacugagaggcu

SEQ ID NO: 32276 - RNA, 20 nt, Artificial Sequence
  HTT spacer sequence TTCN PAM
aaacugaugaaagccaucag

SEQ ID NO: 32277 - RNA, 20 nt, Artificial Sequence
  HTT spacer sequence TTCN PAM
aagccucucagucaccgucc

SEQ ID NO: 32278 - RNA, 20 nt, Artificial Sequence
  HTT spacer sequence TTCN PAM
ucaguuucgaagccucucag

SEQ ID NO: 32279 - RNA, 20 nt, Artificial Sequence
  HTT spacer sequence TTCN PAM
caaauucaaagcccagugaa

SEQ ID NO: 32280 - RNA, 20 nt, Artificial Sequence
  HTT spacer sequence TTCN PAM
aagcccagugaauuccaagg

SEQ ID NO: 32281 - RNA, 20 nt, Artificial Sequence
  HTT spacer sequence TTCN PAM
cugggcuuugaauuugugaa

SEQ ID NO: 32282 - RNA, 20 nt, Artificial Sequence
  HTT spacer sequence TTCN PAM
aaggagaaaaaaagaaaucc

SEQ ID NO: 32283 - RNA, 20 nt, Artificial Sequence
  HTT spacer sequence TTCN PAM
ccuuggaauucacugggcuu

SEQ ID NO: 32284 - RNA, 20 nt, Artificial Sequence
  HTT spacer sequence TTCN PAM
uuuuuucuccuuggaauuca

SEQ ID NO: 32285 - RNA, 20 nt, Artificial Sequence
  HTT spacer sequence TTCN PAM
caguauggauuucuuuuuuu

SEQ ID NO: 32286 - RNA, 20 nt, Artificial Sequence
  HTT spacer sequence TTCN PAM
gauaacccucugccucugag

SEQ ID NO: 32287 - RNA, 20 nt, Artificial Sequence
  HTT spacer sequence TTCN PAM
cucccaaguucucaucaucc

SEQ ID NO: 32288 - RNA, 20 nt, Artificial Sequence
  HTT spacer sequence TTCN PAM
caucaucccagggccaggga

SEQ ID NO: 32289 - RNA, 20 nt, Artificial Sequence
  HTT spacer sequence TTCN PAM
cuaggagagggaucuggcuu

SEQ ID NO: 32290 - RNA, 20 nt, Artificial Sequence
  HTT spacer sequence TTCN PAM
ugucauucuggguauuugua

SEQ ID NO: 32291 - RNA, 20 nt, Artificial Sequence
  HTT spacer sequence TTCN PAM
ggguauuuguagggaaauug

SEQ ID NO: 32292 - RNA, 20 nt, Artificial Sequence
  HTT spacer sequence TTCN PAM
cuacaaauacccagaaugac

SEQ ID NO: 32293 - RNA, 20 nt, Artificial Sequence
  HTT spacer sequence TTCN PAM
aauuucccuacaaauaccca

SEQ ID NO: 32294 - RNA, 20 nt, Artificial Sequence
  HTT spacer sequence TTCN PAM
cuuccaauuucccuacaaau

SEQ ID NO: 32295 - RNA, 20 nt, Artificial Sequence
  HTT spacer sequence TTCN PAM
ggcuguggggaaugucuuug

SEQ ID NO: 32296 - RNA, 20 nt, Artificial Sequence
  HTT spacer sequence TTCN PAM
ccacagccugaaaucuccca

SEQ ID NO: 32297 - RNA, 20 nt, Artificial Sequence
  HTT spacer sequence TTCN PAM
ccagcaaagacauuccccac

SEQ ID NO: 32298 - RNA, 20 nt, Artificial Sequence
  HTT spacer sequence TTCN PAM
uuucaccagcaaagacauuc

SEQ ID NO: 32299 - RNA, 20 nt, Artificial Sequence
  HTT spacer sequence TTCN PAM
aaggucaggauguucuuuuc

SEQ ID NO: 32300 - RNA, 20 nt, Artificial Sequence
  HTT spacer sequence TTCN PAM
ccgagggggaucugcguucc

SEQ ID NO: 32301 - RNA, 20 nt, Artificial Sequence
  HTT spacer sequence TTCN PAM
agaacuucuggagcugguau

SEQ ID NO: 32302 - RNA, 20 nt, Artificial Sequence
  HTT spacer sequence TTCN PAM
ggaacgcagaucccccucgg

SEQ ID NO: 32303 - RNA, 20 nt, Artificial Sequence
  HTT spacer sequence TTCN PAM
ggagcugguauagguaaggc

SEQ ID NO: 32304 - RNA, 20 nt, Artificial Sequence
  HTT spacer sequence TTCN PAM
uacugagccagccuguugcu

SEQ ID NO: 32305 - RNA, 20 nt, Artificial Sequence
  HTT spacer sequence TTCN PAM
guaguuuugcagugauacgu

SEQ ID NO: 32306 - RNA, 20 nt, Artificial Sequence
  HTT spacer sequence TTCN PAM
cugucuuugguuuucuguag

SEQ ID NO: 32307 - RNA, 20 nt, Artificial Sequence
  HTT spacer sequence TTCN PAM
aagcagcagccaugaaauug

SEQ ID NO: 32308 - RNA, 20 nt, Artificial Sequence
  HTT spacer sequence TTCN PAM
uggcugcugcuuugaaacua

SEQ ID NO: 32309 - RNA, 20 nt, Artificial Sequence
  HTT spacer sequence TTCN PAM
ugcuguugagacaucagcug

SEQ ID NO: 32310 - RNA, 20 nt, Artificial Sequence
  HTT spacer sequence TTCN PAM
uucuugcuguugagacauca

SEQ ID NO: 32311 - RNA, 20 nt, Artificial Sequence
  HTT spacer sequence TTCN PAM
acuuuucauucuugcuguug

SEQ ID NO: 32312 - RNA, 20 nt, Artificial Sequence
  HTT spacer sequence TTCN PAM
ccauguuagccaggaugguc

SEQ ID NO: 32313 - RNA, 20 nt, Artificial Sequence
  HTT spacer sequence TTCN PAM
ccugccucagccucccgagu

SEQ ID NO: 32314 - RNA, 20 nt, Artificial Sequence
  HTT spacer sequence TTCN PAM
cgccauucuccugccucagc

SEQ ID NO: 32315 - RNA, 20 nt, Artificial Sequence
  HTT spacer sequence TTCN PAM
ucacccuuuuuuuuuuuuuu

SEQ ID NO: 32316 - RNA, 20 nt, Artificial Sequence
  HTT spacer sequence TTCN PAM
aucuccugaaaggaagcaac

SEQ ID NO: 32317 - RNA, 20 nt, Artificial Sequence
  HTT spacer sequence TTCN PAM
ggagauugaagcuucgucac

SEQ ID NO: 32318 - RNA, 20 nt, Artificial Sequence
  HTT spacer sequence TTCN PAM
uuucaggagauugaagcuuc

SEQ ID NO: 32319 - RNA, 20 nt, Artificial Sequence
  HTT spacer sequence TTCN PAM
auacccaccaaaauccguga

SEQ ID NO: 32320 - RNA, 20 nt, Artificial Sequence
  HTT spacer sequence TTCN PAM
cggauuuugguggguaucga

SEQ ID NO: 32321 - RNA, 20 nt, Artificial Sequence
  HTT spacer sequence TTCN PAM
ucacggauuuugguggguau

SEQ ID NO: 32322 - RNA, 20 nt, Artificial Sequence
  HTT spacer sequence TTCN PAM
uucuucacggauuuuggugg

SEQ ID NO: 32323 - RNA, 20 nt, Artificial Sequence
  HTT spacer sequence TTCN PAM
ugauugaacuggaaagauuu

SEQ ID NO: 32324 - RNA, 20 nt, Artificial Sequence
  HTT spacer sequence TTCN PAM
aucaggaaguguuuuuauuu

SEQ ID NO: 32325 - RNA, 20 nt, Artificial Sequence
  HTT spacer sequence TTCN PAM
aguucaaucaggaaguguuu

SEQ ID NO: 32326 - RNA, 20 nt, Artificial Sequence
  HTT spacer sequence TTCN PAM
gcaauagaagacccacuguc

SEQ ID NO: 32327 - RNA, 20 nt, Artificial Sequence
  HTT spacer sequence TTCN PAM
auugcggaaaucuuuccagu

SEQ ID NO: 32328 - RNA, 20 nt, Artificial Sequence
  HTT spacer sequence TTCN PAM
uuggacagugggucuucuau

SEQ ID NO: 32329 - RNA, 20 nt, Artificial Sequence
  HTT spacer sequence TTCN PAM
aaaggaugcuuuccaggcag

SEQ ID NO: 32330 - RNA, 20 nt, Artificial Sequence
  HTT spacer sequence TTCN PAM
aggcagaagaaaaugacccc

SEQ ID NO: 32331 - RNA, 20 nt, Artificial Sequence
  HTT spacer sequence TTCN PAM
gccuggaaagcauccuuuag

SEQ ID NO: 32332 - RNA, 20 nt, Artificial Sequence
  HTT spacer sequence TTCN PAM
ucugccuggaaagcauccuu

SEQ ID NO: 32333 - RNA, 20 nt, Artificial Sequence
  HTT spacer sequence TTCN PAM
ucuggggucauuuucuucug

SEQ ID NO: 32334 - RNA, 20 nt, Artificial Sequence
  HTT spacer sequence TTCN PAM
ggaaagaaauggagagugau

SEQ ID NO: 32335 - RNA, 20 nt, Artificial Sequence
  HTT spacer sequence TTCN PAM
ugaaucucugaucuuccucu

SEQ ID NO: 32336 - RNA, 20 nt, Artificial Sequence
  HTT spacer sequence TTCN PAM
uuccugaaucucugaucuuc

SEQ ID NO: 32337 - RNA, 20 nt, Artificial Sequence
  HTT spacer sequence TTCN PAM
auuuuuaucacucuccauuu

SEQ ID NO: 32338 - RNA, 20 nt, Artificial Sequence
  HTT spacer sequence TTCN PAM
ggggccaauuuaaacaaaag

SEQ ID NO: 32339 - RNA, 20 nt, Artificial Sequence
  HTT spacer sequence TTCN PAM
cacucugucgcccaggcuac

SEQ ID NO: 32340 - RNA, 20 nt, Artificial Sequence
  HTT spacer sequence TTCN PAM
cuguagccugggcgacagag

SEQ ID NO: 32341 - RNA, 20 nt, Artificial Sequence
  HTT spacer sequence TTCN PAM
cuugccucagccuccugagu

SEQ ID NO: 32342 - RNA, 20 nt, Artificial Sequence
  HTT spacer sequence TTCN PAM
ccauguuggccaggcugguc

SEQ ID NO: 32343 - RNA, 20 nt, Artificial Sequence
  HTT spacer sequence TTCN PAM
agaccagccuggccaacaug

SEQ ID NO: 32344 - RNA, 20 nt, Artificial Sequence
  HTT spacer sequence TTCN PAM
auauaaacacacacauaggc

SEQ ID NO: 32345 - RNA, 20 nt, Artificial Sequence
  HTT spacer sequence TTCN PAM
cccaauuuggaggguauuau

SEQ ID NO: 32346 - RNA, 20 nt, Artificial Sequence
  HTT spacer sequence TTCN PAM
ugauuaugcagggagcuuac

SEQ ID NO: 32347 - RNA, 20 nt, Artificial Sequence
  HTT spacer sequence TTCN PAM
cuucuugauuaugcagggag

SEQ ID NO: 32348 - RNA, 20 nt, Artificial Sequence
  HTT spacer sequence TTCN PAM
uccuccagguaucaaaaucu

SEQ ID NO: 32349 - RNA, 20 nt, Artificial Sequence
  HTT spacer sequence TTCN PAM
agggugaccaugaaaagagg

SEQ ID NO: 32350 - RNA, 20 nt, Artificial Sequence
  HTT spacer sequence TTCN PAM
uggucacccuagaaauuaca

SEQ ID NO: 32351 - RNA, 20 nt, Artificial Sequence
  HTT spacer sequence TTCN PAM
ggccauccucccaccuaggc

SEQ ID NO: 32352 - RNA, 20 nt, Artificial Sequence
  HTT spacer sequence TTCN PAM
ccauguuggccaggcugguc

SEQ ID NO: 32353 - RNA, 20 nt, Artificial Sequence
  HTT spacer sequence TTCN PAM
agaccagccuggccaacaug

SEQ ID NO: 32354 - RNA, 20 nt, Artificial Sequence
  HTT spacer sequence TTCN PAM
aacuaacagagguucaaaaa

SEQ ID NO: 32355 - RNA, 20 nt, Artificial Sequence
  HTT spacer sequence TTCN PAM
aaaauaaaaucagacuuaac

SEQ ID NO: 32356 - RNA, 20 nt, Artificial Sequence
  HTT spacer sequence TTCN PAM
guauauccuaccagcucugu

SEQ ID NO: 32357 - RNA, 20 nt, Artificial Sequence
  HTT spacer sequence TTCN PAM
uuaauauuaacuguaaucgu

SEQ ID NO: 32358 - RNA, 20 nt, Artificial Sequence
  HTT spacer sequence TTCN PAM
uucauuaauauuaacuguaa

SEQ ID NO: 32359 - RNA, 20 nt, Artificial Sequence
  HTT spacer sequence TTCN PAM
uauguggggucuuugacaac

SEQ ID NO: 32360 - RNA, 20 nt, Artificial Sequence
  HTT spacer sequence TTCN PAM
aggugcaccgcugguaagga

SEQ ID NO: 32361 - RNA, 20 nt, Artificial Sequence
  HTT spacer sequence TTCN PAM
uuagguucuaggugcaccgc

SEQ ID NO: 32362 - RNA, 20 nt, Artificial Sequence
  HTT spacer sequence TTCN PAM
ucuguccuguuuccuuaggu

SEQ ID NO: 32363 - RNA, 20 nt, Artificial Sequence
  HTT spacer sequence TTCN PAM
cgucucauaggauggcugag

SEQ ID NO: 32364 - RNA, 20 nt, Artificial Sequence
  HTT spacer sequence TTCN PAM
gucugcagcugggcccgugc

SEQ ID NO: 32365 - RNA, 20 nt, Artificial Sequence
  HTT spacer sequence TTCN PAM
ucucuggaagguuccugccu

SEQ ID NO: 32366 - RNA, 20 nt, Artificial Sequence
  HTT spacer sequence TTCN PAM
cuggaagguuccugccuguu

SEQ ID NO: 32367 - RNA, 20 nt, Artificial Sequence
  HTT spacer sequence TTCN PAM
agagaagaaagccaggagcu

SEQ ID NO: 32368 - RNA, 20 nt, Artificial Sequence
  HTT spacer sequence TTCN PAM
ugccuguuuugcccucacac

SEQ ID NO: 32369 - RNA, 20 nt, Artificial Sequence
  HTT spacer sequence TTCN PAM
cccuggggucugcgucaggg

SEQ ID NO: 32370 - RNA, 20 nt, Artificial Sequence
  HTT spacer sequence TTCN PAM
uucuuuuccagccccacccc

SEQ ID NO: 32371 - RNA, 20 nt, Artificial Sequence
  HTT spacer sequence TTCN PAM
uuuccagccccaccccgcgu

SEQ ID NO: 32372 - RNA, 20 nt, Artificial Sequence
  HTT spacer sequence TTCN PAM
agccccaccccgcgugcauc

SEQ ID NO: 32373 - RNA, 20 nt, Artificial Sequence
  HTT spacer sequence TTCN PAM
aggccucuucucucuucucg

SEQ ID NO: 32374 - RNA, 20 nt, Artificial Sequence
  HTT spacer sequence TTCN PAM
cucuucucggcaggacaggc

SEQ ID NO: 32375 - RNA, 20 nt, Artificial Sequence
  HTT spacer sequence TTCN PAM
cggcaggacaggcacaggca

SEQ ID NO: 32376 - RNA, 20 nt, Artificial Sequence
  HTT spacer sequence TTCN PAM
uucauuuaacaaucuucccc

SEQ ID NO: 32377 - RNA, 20 nt, Artificial Sequence
  HTT spacer sequence TTCN PAM
uuuaacaaucuuccccugaa

SEQ ID NO: 32378 - RNA, 20 nt, Artificial Sequence
  HTT spacer sequence TTCN PAM
ccugaauaguucauguucau

SEQ ID NO: 32379 - RNA, 20 nt, Artificial Sequence
  HTT spacer sequence TTCN PAM
ggggaagauuguuaaaugaa

SEQ ID NO: 32380 - RNA, 20 nt, Artificial Sequence
  HTT spacer sequence TTCN PAM
uguucauugcugaaaauuug

SEQ ID NO: 32381 - RNA, 20 nt, Artificial Sequence
  HTT spacer sequence TTCN PAM
uugcugaaaauuugaaaaau

SEQ ID NO: 32382 - RNA, 20 nt, Artificial Sequence
  HTT spacer sequence TTCN PAM
gcaaugaacaugaacuauuc

SEQ ID NO: 32383 - RNA, 20 nt, Artificial Sequence
  HTT spacer sequence TTCN PAM
aauuuucagcaaugaacaug

SEQ ID NO: 32384 - RNA, 20 nt, Artificial Sequence
  HTT spacer sequence TTCN PAM
auauuuuucaaauuuucagc

SEQ ID NO: 32385 - RNA, 20 nt, Artificial Sequence
  HTT spacer sequence TTCN PAM
ccugcccagagagagucacu

SEQ ID NO: 32386 - RNA, 20 nt, Artificial Sequence
  HTT spacer sequence TTCN PAM
uagucaccaagucauagcag

SEQ ID NO: 32387 - RNA, 20 nt, Artificial Sequence
  HTT spacer sequence TTCN PAM
cucucgcucuuuuuuuuuuu

SEQ ID NO: 32388 - RNA, 20 nt, Artificial Sequence
  HTT spacer sequence TTCN PAM
agcgauucuccugccucagc

SEQ ID NO: 32389 - RNA, 20 nt, Artificial Sequence
  HTT spacer sequence TTCN PAM
ccugccucagccucuugagu

SEQ ID NO: 32390 - RNA, 20 nt, Artificial Sequence
  HTT spacer sequence TTCN PAM
ucuuguuggucaggcggacu

SEQ ID NO: 32391 - RNA, 20 nt, Artificial Sequence
  HTT spacer sequence TTCN PAM
aguccgccugaccaacaaga

SEQ ID NO: 32392 - RNA, 20 nt, Artificial Sequence
  HTT spacer sequence TTCN PAM
ucucucuucuguguaugugu

SEQ ID NO: 32393 - RNA, 20 nt, Artificial Sequence
  HTT spacer sequence TTCN PAM
guguauguguacgcuguuuu

SEQ ID NO: 32394 - RNA, 20 nt, Artificial Sequence
  HTT spacer sequence TTCN PAM
uuagaaugggggacguuauc

SEQ ID NO: 32395 - RNA, 20 nt, Artificial Sequence
  HTT spacer sequence TTCN PAM
aaagaaaaaacagcguacac

SEQ ID NO: 32396 - RNA, 20 nt, Artificial Sequence
  HTT spacer sequence TTCN PAM
cugugucacaagugcucauc

SEQ ID NO: 32397 - RNA, 20 nt, Artificial Sequence
  HTT spacer sequence TTCN PAM
agaugagcacuugugacaca

SEQ ID NO: 32398 - RNA, 20 nt, Artificial Sequence
  HTT spacer sequence TTCN PAM
aaugacugccuguggcuaug

SEQ ID NO: 32399 - RNA, 20 nt, Artificial Sequence
  HTT spacer sequence TTCN PAM
uuuaacucagcuccuucugc

SEQ ID NO: 32400 - RNA, 20 nt, Artificial Sequence
  HTT spacer sequence TTCN PAM
gcccagcaucuaucuuuuuu

SEQ ID NO: 32401 - RNA, 20 nt, Artificial Sequence
  HTT spacer sequence TTCN PAM
aucuuuuguccuaaguguug

SEQ ID NO: 32402 - RNA, 20 nt, Artificial Sequence
  HTT spacer sequence TTCN PAM
cguaauuuauccuaugcaaa

SEQ ID NO: 32403 - RNA, 20 nt, Artificial Sequence
  HTT spacer sequence TTCN PAM
gggacugugcccauuuuuag

SEQ ID NO: 32404 - RNA, 20 nt, Artificial Sequence
  HTT spacer sequence TTCN PAM
gugaacuuuaaaaaccugug

SEQ ID NO: 32405 - RNA, 20 nt, Artificial Sequence
  HTT spacer sequence TTCN PAM
cagaaaaguuuggcaucauc

SEQ ID NO: 32406 - RNA, 20 nt, Artificial Sequence
  HTT spacer sequence TTCN PAM
guaagucuuucacauuagau

SEQ ID NO: 32407 - RNA, 20 nt, Artificial Sequence
  HTT spacer sequence TTCN PAM
cauuagauuuccugucagga

SEQ ID NO: 32408 - RNA, 20 nt, Artificial Sequence
  HTT spacer sequence TTCN PAM
ugucaggaugauagucaauu

SEQ ID NO: 32409 - RNA, 20 nt, Artificial Sequence
  HTT spacer sequence TTCN PAM
aggcagaugauguuuucuca

SEQ ID NO: 32410 - RNA, 20 nt, Artificial Sequence
  HTT spacer sequence TTCN PAM
cagccauggcugaagcaguu

SEQ ID NO: 32411 - RNA, 20 nt, Artificial Sequence
  HTT spacer sequence TTCN PAM
gccauggcugagaaaacauc

SEQ ID NO: 32412 - RNA, 20 nt, Artificial Sequence
  HTT spacer sequence TTCN PAM
aacccauccagggaggcaau

SEQ ID NO: 32413 - RNA, 20 nt, Artificial Sequence
  HTT spacer sequence TTCN PAM
guuauaugcucccaaaccaa

SEQ ID NO: 32414 - RNA, 20 nt, Artificial Sequence
  HTT spacer sequence TTCN PAM
gucugagcugcugugacucc

SEQ ID NO: 32415 - RNA, 20 nt, Artificial Sequence
  HTT spacer sequence TTCN PAM
cccuuacagaugaaagaauu

SEQ ID NO: 32416 - RNA, 20 nt, Artificial Sequence
  HTT spacer sequence TTCN PAM
ucuguaagggagaaauacac

SEQ ID NO: 32417 - RNA, 20 nt, Artificial Sequence
  HTT spacer sequence TTCN PAM
uucaucuguaagggagaaau

SEQ ID NO: 32418 - RNA, 20 nt, Artificial Sequence
  HTT spacer sequence TTCN PAM
aggccaggcuggaaugacaa

SEQ ID NO: 32419 - RNA, 20 nt, Artificial Sequence
  HTT spacer sequence TTCN PAM
agccuggccuggaauucuuu

SEQ ID NO: 32420 - RNA, 20 nt, Artificial Sequence
  HTT spacer sequence TTCN PAM
agcucccaucaccccaggau

SEQ ID NO: 32421 - RNA, 20 nt, Artificial Sequence
  HTT spacer sequence TTCN PAM
agggagcaggaaaaaggugu

SEQ ID NO: 32422 - RNA, 20 nt, Artificial Sequence
  HTT spacer sequence TTCN PAM
ugcucccuggaaugggaugu

SEQ ID NO: 32423 - RNA, 20 nt, Artificial Sequence
  HTT spacer sequence TTCN PAM
cuucauuuuaugugauuccu

SEQ ID NO: 32424 - RNA, 20 nt, Artificial Sequence
  HTT spacer sequence TTCN PAM
uuuuaugugauuccuuucua

SEQ ID NO: 32425 - RNA, 20 nt, Artificial Sequence
  HTT spacer sequence TTCN PAM
uuucuagaaguacuacucau

SEQ ID NO: 32426 - RNA, 20 nt, Artificial Sequence
  HTT spacer sequence TTCN PAM
agaaguacuacucauuacuu

SEQ ID NO: 32427 - RNA, 20 nt, Artificial Sequence
  HTT spacer sequence TTCN PAM
agaaaggaaucacauaaaau

SEQ ID NO: 32428 - RNA, 20 nt, Artificial Sequence
  HTT spacer sequence TTCN PAM
gcuugcaucucccuggcuag

SEQ ID NO: 32429 - RNA, 20 nt, Artificial Sequence
  HTT spacer sequence TTCN PAM
gcuagcuauggccauauaac

SEQ ID NO: 32430 - RNA, 20 nt, Artificial Sequence
  HTT spacer sequence TTCN PAM
uucagcuagcuauggccaua

SEQ ID NO: 32431 - RNA, 20 nt, Artificial Sequence
  HTT spacer sequence TTCN PAM
uuagagaccuuuuuaucuaa

SEQ ID NO: 32432 - RNA, 20 nt, Artificial Sequence
  HTT spacer sequence TTCN PAM
ucccauaacaauaaguaaua

SEQ ID NO: 32433 - RNA, 20 nt, Artificial Sequence
  HTT spacer sequence TTCN PAM
gguugauguccuaagcccca

SEQ ID NO: 32434 - RNA, 20 nt, Artificial Sequence
  HTT spacer sequence TTCN PAM
ggggcuuaggacaucaaccu

SEQ ID NO: 32435 - RNA, 20 nt, Artificial Sequence
  HTT spacer sequence TTCN PAM
gagguucuggggcuuaggac

SEQ ID NO: 32436 - RNA, 20 nt, Artificial Sequence
  HTT spacer sequence TTCN PAM
uuaaggagguaaggaggcua

SEQ ID NO: 32437 - RNA, 20 nt, Artificial Sequence
  HTT spacer sequence TTCN PAM
uguaagacaucagucggauu

SEQ ID NO: 32438 - RNA, 20 nt, Artificial Sequence
  HTT spacer sequence TTCN PAM
ugguguccucacguggccgu

SEQ ID NO: 32439 - RNA, 20 nt, Artificial Sequence
  HTT spacer sequence TTCN PAM
ccugagcccuguccuugacu

SEQ ID NO: 32440 - RNA, 20 nt, Artificial Sequence
  HTT spacer sequence TTCN PAM
ucucggacuucuagccucua

SEQ ID NO: 32441 - RNA, 20 nt, Artificial Sequence
  HTT spacer sequence TTCN PAM
agccucuaggaccaugagaa

SEQ ID NO: 32442 - RNA, 20 nt, Artificial Sequence
  HTT spacer sequence TTCN PAM
caugguccuagaggcuagaa

SEQ ID NO: 32443 - RNA, 20 nt, Artificial Sequence
  HTT spacer sequence TTCN PAM
guuguuuaagcugcccgguc

SEQ ID NO: 32444 - RNA, 20 nt, Artificial Sequence
  HTT spacer sequence TTCN PAM
agcagcagaugacuguauuu

SEQ ID NO: 32445 - RNA, 20 nt, Artificial Sequence
  HTT spacer sequence TTCN PAM
gugggucaggaauuuggacc

SEQ ID NO: 32446 - RNA, 20 nt, Artificial Sequence
  HTT spacer sequence TTCN PAM
ugacccacagaacgugugac

SEQ ID NO: 32447 - RNA, 20 nt, Artificial Sequence
  HTT spacer sequence TTCN PAM
cgccaggguucagucaaaua

SEQ ID NO: 32448 - RNA, 20 nt, Artificial Sequence
  HTT spacer sequence TTCN PAM
gucaaauaccagcugccucc

SEQ ID NO: 32449 - RNA, 20 nt, Artificial Sequence
  HTT spacer sequence TTCN PAM
ccggcugagcucucaggugg

SEQ ID NO: 32450 - RNA, 20 nt, Artificial Sequence
  HTT spacer sequence TTCN PAM
aaucucacgugguguuggca

SEQ ID NO: 32451 - RNA, 20 nt, Artificial Sequence
  HTT spacer sequence TTCN PAM
ucauggccugcuggacugag

SEQ ID NO: 32452 - RNA, 20 nt, Artificial Sequence
  HTT spacer sequence TTCN PAM
caguccagcaggccaugagg

SEQ ID NO: 32453 - RNA, 20 nt, Artificial Sequence
  HTT spacer sequence TTCN PAM
cacugccuguuggccagagg

SEQ ID NO: 32454 - RNA, 20 nt, Artificial Sequence
  HTT spacer sequence TTCN PAM
ucagagcauccaugccaaga

SEQ ID NO: 32455 - RNA, 20 nt, Artificial Sequence
  HTT spacer sequence TTCN PAM
uggcauggaugcucugauga

SEQ ID NO: 32456 - RNA, 20 nt, Artificial Sequence
  HTT spacer sequence TTCN PAM
gucucccuggcccucucugu

SEQ ID NO: 32457 - RNA, 20 nt, Artificial Sequence
  HTT spacer sequence TTCN PAM
aucaccuuugcccauugguu

SEQ ID NO: 32458 - RNA, 20 nt, Artificial Sequence
  HTT spacer sequence TTCN PAM
aaccaaugggcaaaggugau

SEQ ID NO: 32459 - RNA, 20 nt, Artificial Sequence
  HTT spacer sequence TTCN PAM
cugcuguuaauaagggccuu

SEQ ID NO: 32460 - RNA, 20 nt, Artificial Sequence
  HTT spacer sequence TTCN PAM
caguucucugcuguuaauaa

SEQ ID NO: 32461 - RNA, 20 nt, Artificial Sequence
  HTT spacer sequence TTCN PAM
agcaauucugccucagccuc

SEQ ID NO: 32462 - RNA, 20 nt, Artificial Sequence
  HTT spacer sequence TTCN PAM
gccucagccuccggaauagc

SEQ ID NO: 32463 - RNA, 20 nt, Artificial Sequence
  HTT spacer sequence TTCN PAM
ggaggcugaggcagaauugc

SEQ ID NO: 32464 - RNA, 20 nt, Artificial Sequence
  HTT spacer sequence TTCN PAM
ccauguuggccaggcugguc

SEQ ID NO: 32465 - RNA, 20 nt, Artificial Sequence
  HTT spacer sequence TTCN PAM
agaccagccuggccaacaug

SEQ ID NO: 32466 - RNA, 20 nt, Artificial Sequence
  HTT spacer sequence TTCN PAM
agcgaggugcgguggcucac

SEQ ID NO: 32467 - RNA, 20 nt, Artificial Sequence
  HTT spacer sequence TTCN PAM
uggguucaggugauccuccc

SEQ ID NO: 32468 - RNA, 20 nt, Artificial Sequence
  HTT spacer sequence TTCN PAM
ggugauccucccacaucagc

SEQ ID NO: 32469 - RNA, 20 nt, Artificial Sequence
  HTT spacer sequence TTCN PAM
ugggaggcugaugugggagg

SEQ ID NO: 32470 - RNA, 20 nt, Artificial Sequence
  HTT spacer sequence TTCN PAM
caguucuugggaggcugaug

SEQ ID NO: 32471 - RNA, 20 nt, Artificial Sequence
  HTT spacer sequence TTCN PAM
cugcuguccuucucaagaaa

SEQ ID NO: 32472 - RNA, 20 nt, Artificial Sequence
  HTT spacer sequence TTCN PAM
caagaaaagggaggcuacug

SEQ ID NO: 32473 - RNA, 20 nt, Artificial Sequence
  HTT spacer sequence TTCN PAM
ugagaaggacagcagagaaa

SEQ ID NO: 32474 - RNA, 20 nt, Artificial Sequence
  HTT spacer sequence TTCN PAM
cuuuaggacaggcucugaga

SEQ ID NO: 32475 - RNA, 20 nt, Artificial Sequence
  HTT spacer sequence TTCN PAM
gcagcagcucagcagagguc

SEQ ID NO: 32476 - RNA, 20 nt, Artificial Sequence
  HTT spacer sequence TTCN PAM
ggcaggacccccaaggggcg

SEQ ID NO: 32477 - RNA, 20 nt, Artificial Sequence
  HTT spacer sequence TTCN PAM
uuaugggagugcaccccugc

SEQ ID NO: 32478 - RNA, 20 nt, Artificial Sequence
  HTT spacer sequence TTCN PAM
ugugggcggcaucuuguggc

SEQ ID NO: 32479 - RNA, 20 nt, Artificial Sequence
  HTT spacer sequence TTCN PAM
cgcugcacuaaucacagugc

SEQ ID NO: 32480 - RNA, 20 nt, Artificial Sequence
  HTT spacer sequence TTCN PAM
ggggcgcugcgcugggaccg

SEQ ID NO: 32481 - RNA, 20 nt, Artificial Sequence
  HTT spacer sequence TTCN PAM
cugcgcucugcgcaggagcu

SEQ ID NO: 32482 - RNA, 20 nt, Artificial Sequence
  HTT spacer sequence TTCN PAM
gcaugggccugcgcccgcgc

SEQ ID NO: 32483 - RNA, 20 nt, Artificial Sequence
  HTT spacer sequence TTCN PAM
ugggcgagccccuccauggc

SEQ ID NO: 32484 - RNA, 20 nt, Artificial Sequence
  HTT spacer sequence TTCN PAM
ugccccgcccccagccuccc

SEQ ID NO: 32485 - RNA, 20 nt, Artificial Sequence
  HTT spacer sequence TTCN PAM
ucgucccgccucgccgcgac

SEQ ID NO: 32486 - RNA, 20 nt, Artificial Sequence
  HTT spacer sequence TTCN PAM
cacacagcuucgccucaccc

SEQ ID NO: 32487 - RNA, 20 nt, Artificial Sequence
  HTT spacer sequence TTCN PAM
ccucaccccauuacagucuc

SEQ ID NO: 32488 - RNA, 20 nt, Artificial Sequence
  HTT spacer sequence TTCN PAM
cccggguggggcgcugcgcu

SEQ ID NO: 32489 - RNA, 20 nt, Artificial Sequence
  HTT spacer sequence TTCN PAM
gccucacacagcaaggccgc

SEQ ID NO: 32490 - RNA, 20 nt, Artificial Sequence
  HTT spacer sequence TTCN PAM
cuggccagccauuggcagag

SEQ ID NO: 32491 - RNA, 20 nt, Artificial Sequence
  HTT spacer sequence TTCN PAM
gcuuuuaccugcggcccaga

SEQ ID NO: 32492 - RNA, 20 nt, Artificial Sequence
  HTT spacer sequence TTCN PAM
uugccccggugcugagcggc

SEQ ID NO: 32493 - RNA, 20 nt, Artificial Sequence
  HTT spacer sequence TTCN PAM
agggucgccauggcggucuc

SEQ ID NO: 32494 - RNA, 20 nt, Artificial Sequence
  HTT spacer sequence TTCN PAM
ucagcuuuuccagggucgcc

SEQ ID NO: 32495 - RNA, 20 nt, Artificial Sequence
  HTT spacer sequence TTCN PAM
agucccucaaguccuuccag

SEQ ID NO: 32496 - RNA, 20 nt, Artificial Sequence
  HTT spacer sequence TTCN PAM
agcagcagcagcagcagcag

SEQ ID NO: 32497 - RNA, 20 nt, Artificial Sequence
  HTT spacer sequence TTCN PAM
ucagccgccgccgcaggcac

SEQ ID NO: 32498 - RNA, 20 nt, Artificial Sequence
  HTT spacer sequence TTCN PAM
ugucgccggcccgcaggcug

SEQ ID NO: 32499 - RNA, 20 nt, Artificial Sequence
  HTT spacer sequence TTCN PAM
cccacuucagccccgcuccc

SEQ ID NO: 32500 - RNA, 20 nt, Artificial Sequence
  HTT spacer sequence TTCN PAM
gccccgcucccucacuuggg

SEQ ID NO: 32501 - RNA, 20 nt, Artificial Sequence
  HTT spacer sequence TTCN PAM
cuuguccucucgcgagggga

SEQ ID NO: 32502 - RNA, 20 nt, Artificial Sequence
  HTT spacer sequence TTCN PAM
ggacaggccccaacaaggcu

SEQ ID NO: 32503 - RNA, 20 nt, Artificial Sequence
  HTT spacer sequence TTCN PAM
ccgaggggagucacggccuc

SEQ ID NO: 32504 - RNA, 20 nt, Artificial Sequence
  HTT spacer sequence TTCN PAM
caggaugcgaagaguugggg

SEQ ID NO: 32505 - RNA, 20 nt, Artificial Sequence
  HTT spacer sequence TTCN PAM
cauccugcgaagggcgagag

SEQ ID NO: 32506 - RNA, 20 nt, Artificial Sequence
  HTT spacer sequence TTCN PAM
cgccccaacucuucgcaucc

SEQ ID NO: 32507 - RNA, 20 nt, Artificial Sequence
  HTT spacer sequence TTCN PAM
uuuuauuugcgagaaaccag

SEQ ID NO: 32508 - RNA, 20 nt, Artificial Sequence
  HTT spacer sequence TTCN PAM
cgcaaauaaaaagaaacaag

SEQ ID NO: 32509 - RNA, 20 nt, Artificial Sequence
  HTT spacer sequence TTCN PAM
uuuaacugcguugugaagag

SEQ ID NO: 32510 - RNA, 20 nt, Artificial Sequence
  HTT spacer sequence TTCN PAM
caacgcaguuaaaagaaccc

SEQ ID NO: 32511 - RNA, 20 nt, Artificial Sequence
  HTT spacer sequence TTCN PAM
cuucacaacgcaguuaaaag

SEQ ID NO: 32512 - RNA, 20 nt, Artificial Sequence
  HTT spacer sequence TTCN PAM
cucuucuagucugagaggga

SEQ ID NO: 32513 - RNA, 20 nt, Artificial Sequence
  HTT spacer sequence TTCN PAM
agucugagagggaagagggc

SEQ ID NO: 32514 - RNA, 20 nt, Artificial Sequence
  HTT spacer sequence TTCN PAM
cucucagacuagaagaggga

SEQ ID NO: 32515 - RNA, 20 nt, Artificial Sequence
  HTT spacer sequence TTCN PAM
agaggaggcgggguuuggag

SEQ ID NO: 32516 - RNA, 20 nt, Artificial Sequence
  HTT spacer sequence TTCN PAM
uuuccuaguggcacuuaaaa

SEQ ID NO: 32517 - RNA, 20 nt, Artificial Sequence
  HTT spacer sequence TTCN PAM
uaguggcacuuaaaacagcc

SEQ ID NO: 32518 - RNA, 20 nt, Artificial Sequence
  HTT spacer sequence TTCN PAM
uacauugucaggacauuuca

SEQ ID NO: 32519 - RNA, 20 nt, Artificial Sequence
  HTT spacer sequence TTCN PAM
uuuaguucaugaucacggug

SEQ ID NO: 32520 - RNA, 20 nt, Artificial Sequence
  HTT spacer sequence TTCN PAM
ugaucacggugguaguaaca

SEQ ID NO: 32521 - RNA, 20 nt, Artificial Sequence
  HTT spacer sequence TTCN PAM
aacgccugcagaccaacuua

SEQ ID NO: 32522 - RNA, 20 nt, Artificial Sequence
  HTT spacer sequence TTCN PAM
ccacuuuacuuggcaaccac

SEQ ID NO: 32523 - RNA, 20 nt, Artificial Sequence
  HTT spacer sequence TTCN PAM
uuaaucaccacguaaguuca

SEQ ID NO: 32524 - RNA, 20 nt, Artificial Sequence
  HTT spacer sequence TTCN PAM
uaauauuuaagauaauuuca

SEQ ID NO: 32525 - RNA, 20 nt, Artificial Sequence
  HTT spacer sequence TTCN PAM
aucaacucuuccuaauauuu

SEQ ID NO: 32526 - RNA, 20 nt, Artificial Sequence
  HTT spacer sequence TTCN PAM
caacacacauaggcaaaaaa

SEQ ID NO: 32527 - RNA, 20 nt, Artificial Sequence
  HTT spacer sequence TTCN PAM
ucccucggcaauuaaccucc

SEQ ID NO: 32528 - RNA, 20 nt, Artificial Sequence
  HTT spacer sequence TTCN PAM
agucaggcuugccagaauac

SEQ ID NO: 32529 - RNA, 20 nt, Artificial Sequence
  HTT spacer sequence TTCN PAM
ggcaagccugacuggaauac

SEQ ID NO: 32530 - RNA, 20 nt, Artificial Sequence
  HTT spacer sequence TTCN PAM
cuggcacaucugagaugccc

SEQ ID NO: 32531 - RNA, 20 nt, Artificial Sequence
  HTT spacer sequence TTCN PAM
guuugcuucauugcugacag

SEQ ID NO: 32532 - RNA, 20 nt, Artificial Sequence
  HTT spacer sequence TTCN PAM
uugcugacagcuuguuacuu

SEQ ID NO: 32533 - RNA, 20 nt, Artificial Sequence
  HTT spacer sequence TTCN PAM
aaaaaguaacaagcugucag

SEQ ID NO: 32534 - RNA, 20 nt, Artificial Sequence
  HTT spacer sequence TTCN PAM
guugcuuguucuuggggaga

SEQ ID NO: 32535 - RNA, 20 nt, Artificial Sequence
  HTT spacer sequence TTCN PAM
uggggagaauuuuugaaaca

SEQ ID NO: 32536 - RNA, 20 nt, Artificial Sequence
  HTT spacer sequence TTCN PAM
ccccaagaacaagcaacaga

SEQ ID NO: 32537 - RNA, 20 nt, Artificial Sequence
  HTT spacer sequence TTCN PAM
aaaauucuccccaagaacaa

SEQ ID NO: 32538 - RNA, 20 nt, Artificial Sequence
  HTT spacer sequence TTCN PAM
uguuucaaaaauucucccca

SEQ ID NO: 32539 - RNA, 20 nt, Artificial Sequence
  HTT spacer sequence TTCN PAM
gcuagauguuuuaauggucu

SEQ ID NO: 32540 - RNA, 20 nt, Artificial Sequence
  HTT spacer sequence TTCN PAM
cuggaagucugugugucgag

SEQ ID NO: 32541 - RNA, 20 nt, Artificial Sequence
  HTT spacer sequence TTCN PAM
agggaaaguccugggguucc

SEQ ID NO: 32542 - RNA, 20 nt, Artificial Sequence
  HTT spacer sequence TTCN PAM
uaacuccuacuguacacucg

SEQ ID NO: 32543 - RNA, 20 nt, Artificial Sequence
  HTT spacer sequence TTCN PAM
ggccuuucucuuaccucuca

SEQ ID NO: 32544 - RNA, 20 nt, Artificial Sequence
  HTT spacer sequence TTCN PAM
cuuaccucucaguauucuau

SEQ ID NO: 32545 - RNA, 20 nt, Artificial Sequence
  HTT spacer sequence TTCN PAM
auuuccgaucuggauguguc

SEQ ID NO: 32546 - RNA, 20 nt, Artificial Sequence
  HTT spacer sequence TTCN PAM
gaucuggaugugucccagau

SEQ ID NO: 32547 - RNA, 20 nt, Artificial Sequence
  HTT spacer sequence TTCN PAM
uaccaaaugccaucugggac

SEQ ID NO: 32548 - RNA, 20 nt, Artificial Sequence
  HTT spacer sequence TTCN PAM
uguucuuuguuucuguuaug

SEQ ID NO: 32549 - RNA, 20 nt, Artificial Sequence
  HTT spacer sequence TTCN PAM
uuguuucuguuaugauccuu

SEQ ID NO: 32550 - RNA, 20 nt, Artificial Sequence
  HTT spacer sequence TTCN PAM
guuaugauccuugucucguc

SEQ ID NO: 32551 - RNA, 20 nt, Artificial Sequence
  HTT spacer sequence TTCN PAM
aaguuuaauuagaaaaugau

SEQ ID NO: 32552 - RNA, 20 nt, Artificial Sequence
  HTT spacer sequence TTCN PAM
aauuaaacuuugaagacgag

SEQ ID NO: 32553 - RNA, 20 nt, Artificial Sequence
  HTT spacer sequence TTCN PAM
gagagcaguguuagcuuauu

SEQ ID NO: 32554 - RNA, 20 nt, Artificial Sequence
  HTT spacer sequence TTCN PAM
aacaaauaagcuaacacugc

SEQ ID NO: 32555 - RNA, 20 nt, Artificial Sequence
  HTT spacer sequence TTCN PAM
uaaauuuuauuccaacaaau

SEQ ID NO: 32556 - RNA, 20 nt, Artificial Sequence
  HTT spacer sequence TTCN PAM
aaaggauggaaaaacuuuuu

SEQ ID NO: 32557 - RNA, 20 nt, Artificial Sequence
  HTT spacer sequence TTCN PAM
auccuuuagaauaauuuauu

SEQ ID NO: 32558 - RNA, 20 nt, Artificial Sequence
  HTT spacer sequence TTCN PAM
ccaaauauccaaaaaguuuu

SEQ ID NO: 32559 - RNA, 20 nt, Artificial Sequence
  HTT spacer sequence TTCN PAM
guaaguaauuucucauccag

SEQ ID NO: 32560 - RNA, 20 nt, Artificial Sequence
  HTT spacer sequence TTCN PAM
cauccagaaauuuacuguag

SEQ ID NO: 32561 - RNA, 20 nt, Artificial Sequence
  HTT spacer sequence TTCN PAM
ggaugagaaauuacuuacug

SEQ ID NO: 32562 - RNA, 20 nt, Artificial Sequence
  HTT spacer sequence TTCN PAM
aggagguaggugucauaaaa

SEQ ID NO: 32563 - RNA, 20 nt, Artificial Sequence
  HTT spacer sequence TTCN PAM
cacauugcauguaucuugug

SEQ ID NO: 32564 - RNA, 20 nt, Artificial Sequence
  HTT spacer sequence TTCN PAM
caucaggagcccuguuuagu

SEQ ID NO: 32565 - RNA, 20 nt, Artificial Sequence
  HTT spacer sequence TTCN PAM
uucccaucaggagcccuguu

SEQ ID NO: 32566 - RNA, 20 nt, Artificial Sequence
  HTT spacer sequence TTCN PAM
gcugggcugcuucagacacu

SEQ ID NO: 32567 - RNA, 20 nt, Artificial Sequence
  HTT spacer sequence TTCN PAM
gacacuugaucauucuaaaa

SEQ ID NO: 32568 - RNA, 20 nt, Artificial Sequence
  HTT spacer sequence TTCN PAM
aaaaauaugccuucucuuuc

SEQ ID NO: 32569 - RNA, 20 nt, Artificial Sequence
  HTT spacer sequence TTCN PAM
cuuucuuaugcugauuugac

SEQ ID NO: 32570 - RNA, 20 nt, Artificial Sequence
  HTT spacer sequence TTCN PAM
uaugcugauuugacagaacc

SEQ ID NO: 32571 - RNA, 20 nt, Artificial Sequence
  HTT spacer sequence TTCN PAM
gucaaaucagcauaagaaag

SEQ ID NO: 32572 - RNA, 20 nt, Artificial Sequence
  HTT spacer sequence TTCN PAM
aaauauggguaucaagaaau

SEQ ID NO: 32573 - RNA, 20 nt, Artificial Sequence
  HTT spacer sequence TTCN PAM
ugauacccauauuuugaaga

SEQ ID NO: 32574 - RNA, 20 nt, Artificial Sequence
  HTT spacer sequence TTCN PAM
uuugcugccuugacaaagga

SEQ ID NO: 32575 - RNA, 20 nt, Artificial Sequence
  HTT spacer sequence TTCN PAM
uuacuuuaagguaauauaug

SEQ ID NO: 32576 - RNA, 20 nt, Artificial Sequence
  HTT spacer sequence TTCN PAM
uccaccuaggccucccaaag

SEQ ID NO: 32577 - RNA, 20 nt, Artificial Sequence
  HTT spacer sequence TTCN PAM
ccauguuagccaggcugguc

SEQ ID NO: 32578 - RNA, 20 nt, Artificial Sequence
  HTT spacer sequence TTCN PAM
ugccucagccucccagguag

SEQ ID NO: 32579 - RNA, 20 nt, Artificial Sequence
  HTT spacer sequence TTCN PAM
agcgauuuuccugccucagc

SEQ ID NO: 32580 - RNA, 20 nt, Artificial Sequence
  HTT spacer sequence TTCN PAM
guaauuacaaaagggcaaua

SEQ ID NO: 32581 - RNA, 20 nt, Artificial Sequence
  HTT spacer sequence TTCN PAM
uuccaccccuuuccucugag

SEQ ID NO: 32582 - RNA, 20 nt, Artificial Sequence
  HTT spacer sequence TTCN PAM
accccuuuccucugaguacc

SEQ ID NO: 32583 - RNA, 20 nt, Artificial Sequence
  HTT spacer sequence TTCN PAM
ucugaguaccuaacuuuguc

SEQ ID NO: 32584 - RNA, 20 nt, Artificial Sequence
  HTT spacer sequence TTCN PAM
uggggacaaaguuagguacu

SEQ ID NO: 32585 - RNA, 20 nt, Artificial Sequence
  HTT spacer sequence TTCN PAM
guuccucauguauccugcca

SEQ ID NO: 32586 - RNA, 20 nt, Artificial Sequence
  HTT spacer sequence TTCN PAM
ucauguauccugccagauau

SEQ ID NO: 32587 - RNA, 20 nt, Artificial Sequence
  HTT spacer sequence TTCN PAM
uauuguaagauagauuuaaa

SEQ ID NO: 32588 - RNA, 20 nt, Artificial Sequence
  HTT spacer sequence TTCN PAM
aaacuacuuuuguuuuuaga

SEQ ID NO: 32589 - RNA, 20 nt, Artificial Sequence
  HTT spacer sequence TTCN PAM
aaugcuucuccugccucagc

SEQ ID NO: 32590 - RNA, 20 nt, Artificial Sequence
  HTT spacer sequence TTCN PAM
ccugccucagccuucugagu

SEQ ID NO: 32591 - RNA, 20 nt, Artificial Sequence
  HTT spacer sequence TTCN PAM
gaguagcugggauuacaggc

SEQ ID NO: 32592 - RNA, 20 nt, Artificial Sequence
  HTT spacer sequence TTCN PAM
ccauguuggccaggcugguc

SEQ ID NO: 32593 - RNA, 20 nt, Artificial Sequence
  HTT spacer sequence TTCN PAM
agaccagccuggccaacaug

SEQ ID NO: 32594 - RNA, 20 nt, Artificial Sequence
  HTT spacer sequence TTCN PAM
agccaggcaugguggcucac

SEQ ID NO: 32595 - RNA, 20 nt, Artificial Sequence
  HTT spacer sequence TTCN PAM
uagcaugcucugaaaucaac

SEQ ID NO: 32596 - RNA, 20 nt, Artificial Sequence
  HTT spacer sequence TTCN PAM
gagcaugcuaagaaccuuua

SEQ ID NO: 32597 - RNA, 20 nt, Artificial Sequence
  HTT spacer sequence TTCN PAM
cuguauuuugcuguugagaa

SEQ ID NO: 32598 - RNA, 20 nt, Artificial Sequence
  HTT spacer sequence TTCN PAM
caacagcaaaauacagagaa

SEQ ID NO: 32599 - RNA, 20 nt, Artificial Sequence
  HTT spacer sequence TTCN PAM
cuaauuuugaguaacaaaca

SEQ ID NO: 32600 - RNA, 20 nt, Artificial Sequence
  HTT spacer sequence TTCN PAM
guucacgugcuucagccaaa

SEQ ID NO: 32601 - RNA, 20 nt, Artificial Sequence
  HTT spacer sequence TTCN PAM
cgugcuucagccaaaaaauc

SEQ ID NO: 32602 - RNA, 20 nt, Artificial Sequence
  HTT spacer sequence TTCN PAM
gccaaaaaauccucuucuca

SEQ ID NO: 32603 - RNA, 20 nt, Artificial Sequence
  HTT spacer sequence TTCN PAM
caaaguaagauugaugaaag

SEQ ID NO: 32604 - RNA, 20 nt, Artificial Sequence
  HTT spacer sequence TTCN PAM
ucaaucuuacuuugagaaga

SEQ ID NO: 32605 - RNA, 20 nt, Artificial Sequence
  HTT spacer sequence TTCN PAM
aaauugcuuucaucaaucuu

SEQ ID NO: 32606 - RNA, 20 nt, Artificial Sequence
  HTT spacer sequence TTCN PAM
guuuuuauggcucuugcucu

SEQ ID NO: 32607 - RNA, 20 nt, Artificial Sequence
  HTT spacer sequence TTCN PAM
acaccaaagagcaagagcca

SEQ ID NO: 32608 - RNA, 20 nt, Artificial Sequence
  HTT spacer sequence TTCN PAM
uuauggggcuggcugcaggc

SEQ ID NO: 32609 - RNA, 20 nt, Artificial Sequence
  HTT spacer sequence TTCN PAM
ggcaguuucuuauucuccuu

SEQ ID NO: 32610 - RNA, 20 nt, Artificial Sequence
  HTT spacer sequence TTCN PAM
uauucuccuucagauuccua

SEQ ID NO: 32611 - RNA, 20 nt, Artificial Sequence
  HTT spacer sequence TTCN PAM
ccuucagauuccuaucuggu

SEQ ID NO: 32612 - RNA, 20 nt, Artificial Sequence
  HTT spacer sequence TTCN PAM
gauuccuaucugguguuucc

SEQ ID NO: 32613 - RNA, 20 nt, Artificial Sequence
  HTT spacer sequence TTCN PAM
uaucugguguuucccugacu

SEQ ID NO: 32614 - RNA, 20 nt, Artificial Sequence
  HTT spacer sequence TTCN PAM
cugacuuuauucauucauca

SEQ ID NO: 32615 - RNA, 20 nt, Artificial Sequence
  HTT spacer sequence TTCN PAM
uucaucaguaaauauuuacu

SEQ ID NO: 32616 - RNA, 20 nt, Artificial Sequence
  HTT spacer sequence TTCN PAM
ucaguaaauauuuacuaaac

SEQ ID NO: 32617 - RNA, 20 nt, Artificial Sequence
  HTT spacer sequence TTCN PAM
cgagggcagagcuuugucug

SEQ ID NO: 32618 - RNA, 20 nt, Artificial Sequence
  HTT spacer sequence TTCN PAM
uucuaaugaaggacauagac

SEQ ID NO: 32619 - RNA, 20 nt, Artificial Sequence
  HTT spacer sequence TTCN PAM
aaugaaggacauagacagua

SEQ ID NO: 32620 - RNA, 20 nt, Artificial Sequence
  HTT spacer sequence TTCN PAM
uuagaaugaaagcuucacga

SEQ ID NO: 32621 - RNA, 20 nt, Artificial Sequence
  HTT spacer sequence TTCN PAM
uccacguauuaacguacugu

SEQ ID NO: 32622 - RNA, 20 nt, Artificial Sequence
  HTT spacer sequence TTCN PAM
aagcagggaaggggauaggg

SEQ ID NO: 32623 - RNA, 20 nt, Artificial Sequence
  HTT spacer sequence TTCN PAM
cugcuuugaaguuccuccac

SEQ ID NO: 32624 - RNA, 20 nt, Artificial Sequence
  HTT spacer sequence TTCN PAM
cuauccccuucccugcuuug

SEQ ID NO: 32625 - RNA, 20 nt, Artificial Sequence
  HTT spacer sequence TTCN PAM
agcaaaacccagaaagccug

SEQ ID NO: 32626 - RNA, 20 nt, Artificial Sequence
  HTT spacer sequence TTCN PAM
ggguuuugcuggaaagcccu

SEQ ID NO: 32627 - RNA, 20 nt, Artificial Sequence
  HTT spacer sequence TTCN PAM
aaaagagcuguagcacuaag

SEQ ID NO: 32628 - RNA, 20 nt, Artificial Sequence
  HTT spacer sequence TTCN PAM
ugcucuaucagccaggcugg

SEQ ID NO: 32629 - RNA, 20 nt, Artificial Sequence
  HTT spacer sequence TTCN PAM
agugauucucaugccucagc

SEQ ID NO: 32630 - RNA, 20 nt, Artificial Sequence
  HTT spacer sequence TTCN PAM
caugccucagccuccuguuu

SEQ ID NO: 32631 - RNA, 20 nt, Artificial Sequence
  HTT spacer sequence TTCN PAM
cccgagacggagucuugcuc

SEQ ID NO: 32632 - RNA, 20 nt, Artificial Sequence
  HTT spacer sequence TTCN PAM
cgaguucacgccauucuccu

SEQ ID NO: 32633 - RNA, 20 nt, Artificial Sequence
  HTT spacer sequence TTCN PAM
cgccauucuccugccucagu

SEQ ID NO: 32634 - RNA, 20 nt, Artificial Sequence
  HTT spacer sequence TTCN PAM
ccugccucagucucccaagu

SEQ ID NO: 32635 - RNA, 20 nt, Artificial Sequence
  HTT spacer sequence TTCN PAM
ccguguuagccaggaugauc

SEQ ID NO: 32636 - RNA, 20 nt, Artificial Sequence
  HTT spacer sequence TTCN PAM
agaccagccugcucaucaug

SEQ ID NO: 32637 - RNA, 20 nt, Artificial Sequence
  HTT spacer sequence TTCN PAM
gggaagguccacugagaaga

SEQ ID NO: 32638 - RNA, 20 nt, Artificial Sequence
  HTT spacer sequence TTCN PAM
cugaacaccguauuuaaaau

SEQ ID NO: 32639 - RNA, 20 nt, Artificial Sequence
  HTT spacer sequence TTCN PAM
caguggaccuucccugaaca

SEQ ID NO: 32640 - RNA, 20 nt, Artificial Sequence
  HTT spacer sequence TTCN PAM
agccuggguuaaagagcaag

SEQ ID NO: 32641 - RNA, 20 nt, Artificial Sequence
  HTT spacer sequence TTCN PAM
gccuugaacuccugggcuca

SEQ ID NO: 32642 - RNA, 20 nt, Artificial Sequence
  HTT spacer sequence TTCN PAM
aggcugaagugagcuacgau

SEQ ID NO: 32643 - RNA, 20 nt, Artificial Sequence
  HTT spacer sequence TTCN PAM
uacacccuuacacuagacuc

SEQ ID NO: 32644 - RNA, 20 nt, Artificial Sequence
  HTT spacer sequence TTCN PAM
agauggggggaacaggucca

SEQ ID NO: 32645 - RNA, 20 nt, Artificial Sequence
  HTT spacer sequence TTCN PAM
ccccaucuggaauaccacua

SEQ ID NO: 32646 - RNA, 20 nt, Artificial Sequence
  HTT spacer sequence TTCN PAM
uguuucaggaauagcaagga

SEQ ID NO: 32647 - RNA, 20 nt, Artificial Sequence
  HTT spacer sequence TTCN PAM
ggaauagcaaggaugucauu

SEQ ID NO: 32648 - RNA, 20 nt, Artificial Sequence
  HTT spacer sequence TTCN PAM
ugaaacaggaagauuuugga

SEQ ID NO: 32649 - RNA, 20 nt, Artificial Sequence
  HTT spacer sequence TTCN PAM
cccaacuaaaaugacauccu

SEQ ID NO: 32650 - RNA, 20 nt, Artificial Sequence
  HTT spacer sequence TTCN PAM
uacuacaaaugucccccuca

SEQ ID NO: 32651 - RNA, 20 nt, Artificial Sequence
  HTT spacer sequence TTCN PAM
aucuacaaggcaaguaguau

SEQ ID NO: 32652 - RNA, 20 nt, Artificial Sequence
  HTT spacer sequence TTCN PAM
gaucaugcuacuccucugcu

SEQ ID NO: 32653 - RNA, 20 nt, Artificial Sequence
  HTT spacer sequence TTCN PAM
aucuuaagugaacucuggcu

SEQ ID NO: 32654 - RNA, 20 nt, Artificial Sequence
  HTT spacer sequence TTCN PAM
cuuaagauugaaauucagau

SEQ ID NO: 32655 - RNA, 20 nt, Artificial Sequence
  HTT spacer sequence TTCN PAM
cucuguugucagccagaguu

SEQ ID NO: 32656 - RNA, 20 nt, Artificial Sequence
  HTT spacer sequence TTCN PAM
ccuucacucuguugucagcc

SEQ ID NO: 32657 - RNA, 20 nt, Artificial Sequence
  HTT spacer sequence TTCN PAM
gcuuuugccgguguuccccu

SEQ ID NO: 32658 - RNA, 20 nt, Artificial Sequence
  HTT spacer sequence TTCN PAM
uaacugguuucugcuuuugc

SEQ ID NO: 32659 - RNA, 20 nt, Artificial Sequence
  HTT spacer sequence TTCN PAM
gucaggguaccggcugucgg

SEQ ID NO: 32660 - RNA, 20 nt, Artificial Sequence
  HTT spacer sequence TTCN PAM
ucacacugcccacagccgac

SEQ ID NO: 32661 - RNA, 20 nt, Artificial Sequence
  HTT spacer sequence TTCN PAM
aaauccagucagucauuccu

SEQ ID NO: 32662 - RNA, 20 nt, Artificial Sequence
  HTT spacer sequence TTCN PAM
gcauucaaaauccagucagu

SEQ ID NO: 32663 - RNA, 20 nt, Artificial Sequence
  HTT spacer sequence TTCN PAM
acaagugcaguugguuccgc

SEQ ID NO: 32664 - RNA, 20 nt, Artificial Sequence
  HTT spacer sequence TTCN PAM
gcugcaaguaacagaaaauc

SEQ ID NO: 32665 - RNA, 20 nt, Artificial Sequence
  HTT spacer sequence TTCN PAM
guuacuugcagcugaauaca

SEQ ID NO: 32666 - RNA, 20 nt, Artificial Sequence
  HTT spacer sequence TTCN PAM
gauaagcucuugcuuguuac

SEQ ID NO: 32667 - RNA, 20 nt, Artificial Sequence
  HTT spacer sequence TTCN PAM
ccagacuuauuuuugucuuc

SEQ ID NO: 32668 - RNA, 20 nt, Artificial Sequence
  HTT spacer sequence TTCN PAM
acaauaaguuaaggaaccca

SEQ ID NO: 32669 - RNA, 20 nt, Artificial Sequence
  HTT spacer sequence TTCN PAM
uuaacuuauuguugaauuuc

SEQ ID NO: 32670 - RNA, 20 nt, Artificial Sequence
  HTT spacer sequence TTCN PAM
uuuuuuuuuuuuugaaacgg

SEQ ID NO: 32671 - RNA, 20 nt, Artificial Sequence
  HTT spacer sequence TTCN PAM
aaaaaaaaaaaaagaaagag

SEQ ID NO: 32672 - RNA, 20 nt, Artificial Sequence
  HTT spacer sequence TTCN PAM
cucuugucacccgggcugga

SEQ ID NO: 32673 - RNA, 20 nt, Artificial Sequence
  HTT spacer sequence TTCN PAM
agugauucuucugccucagc

SEQ ID NO: 32674 - RNA, 20 nt, Artificial Sequence
  HTT spacer sequence TTCN PAM
ucugccucagccucccaagu

SEQ ID NO: 32675 - RNA, 20 nt, Artificial Sequence
  HTT spacer sequence TTCN PAM
gccucagccucccaaguaac

SEQ ID NO: 32676 - RNA, 20 nt, Artificial Sequence
  HTT spacer sequence TTCN PAM
ccauguuggccaggcugguc

SEQ ID NO: 32677 - RNA, 20 nt, Artificial Sequence
  HTT spacer sequence TTCN PAM
agaccagccuggccaacaug

SEQ ID NO: 32678 - RNA, 20 nt, Artificial Sequence
  HTT spacer sequence TTCN PAM
gaccucaggugauccacucg

SEQ ID NO: 32679 - RNA, 20 nt, Artificial Sequence
  HTT spacer sequence TTCN PAM
gaccgggugcaguggcccaa

SEQ ID NO: 32680 - RNA, 20 nt, Artificial Sequence
  HTT spacer sequence TTCN PAM
uauacuuaccuugcaaaccc

SEQ ID NO: 32681 - RNA, 20 nt, Artificial Sequence
  HTT spacer sequence TTCN PAM
cauuuuuucccuuuguauuu

SEQ ID NO: 32682 - RNA, 20 nt, Artificial Sequence
  HTT spacer sequence TTCN PAM
cuuuguauuuuuauuguuga

SEQ ID NO: 32683 - RNA, 20 nt, Artificial Sequence
  HTT spacer sequence TTCN PAM
acaauaaaaauacaaaggga

SEQ ID NO: 32684 - RNA, 20 nt, Artificial Sequence
  HTT spacer sequence TTCN PAM
uuauauauucuggauacugg

SEQ ID NO: 32685 - RNA, 20 nt, Artificial Sequence
  HTT spacer sequence TTCN PAM
ggauacuggauucuuaucag

SEQ ID NO: 32686 - RNA, 20 nt, Artificial Sequence
  HTT spacer sequence TTCN PAM
uaucagauagaugauuugua

SEQ ID NO: 32687 - RNA, 20 nt, Artificial Sequence
  HTT spacer sequence TTCN PAM
uuuggauugucuuuuuacuu

SEQ ID NO: 32688 - RNA, 20 nt, Artificial Sequence
  HTT spacer sequence TTCN PAM
ugauagugucuuuugaagug

SEQ ID NO: 32689 - RNA, 20 nt, Artificial Sequence
  HTT spacer sequence TTCN PAM
aaagacacuaucaagaaagu

SEQ ID NO: 32690 - RNA, 20 nt, Artificial Sequence
  HTT spacer sequence TTCN PAM
ucaaaauuaaaaacuuuuac

SEQ ID NO: 32691 - RNA, 20 nt, Artificial Sequence
  HTT spacer sequence TTCN PAM
agugucauaucuaagaaauc

SEQ ID NO: 32692 - RNA, 20 nt, Artificial Sequence
  HTT spacer sequence TTCN PAM
uagauaugacacuugaagca

SEQ ID NO: 32693 - RNA, 20 nt, Artificial Sequence
  HTT spacer sequence TTCN PAM
ucuaagaauuuuagaguuuu

SEQ ID NO: 32694 - RNA, 20 nt, Artificial Sequence
  HTT spacer sequence TTCN PAM
aagaauuuuagaguuuuaca

SEQ ID NO: 32695 - RNA, 20 nt, Artificial Sequence
  HTT spacer sequence TTCN PAM
uagaagaaaacauaggagua

SEQ ID NO: 32696 - RNA, 20 nt, Artificial Sequence
  HTT spacer sequence TTCN PAM
gguagaaguccaacuuuauu

SEQ ID NO: 32697 - RNA, 20 nt, Artificial Sequence
  HTT spacer sequence TTCN PAM
accugaaccauauauaaaaa

SEQ ID NO: 32698 - RNA, 20 nt, Artificial Sequence
  HTT spacer sequence TTCN PAM
uuuccaugugguuauucagu

SEQ ID NO: 32699 - RNA, 20 nt, Artificial Sequence
  HTT spacer sequence TTCN PAM
augugguuauucaguugucc

SEQ ID NO: 32700 - RNA, 20 nt, Artificial Sequence
  HTT spacer sequence TTCN PAM
guugucccagcacuguuugu

SEQ ID NO: 32701 - RNA, 20 nt, Artificial Sequence
  HTT spacer sequence TTCN PAM
acaaacagugcugggacaac

SEQ ID NO: 32702 - RNA, 20 nt, Artificial Sequence
  HTT spacer sequence TTCN PAM
uuccccauggaauuaucuua

SEQ ID NO: 32703 - RNA, 20 nt, Artificial Sequence
  HTT spacer sequence TTCN PAM
ccauggaauuaucuuaguac

SEQ ID NO: 32704 - RNA, 20 nt, Artificial Sequence
  HTT spacer sequence TTCN PAM
auggggaaagaauagucucu

SEQ ID NO: 32705 - RNA, 20 nt, Artificial Sequence
  HTT spacer sequence TTCN PAM
acaaggguacuaagauaauu

SEQ ID NO: 32706 - RNA, 20 nt, Artificial Sequence
  HTT spacer sequence TTCN PAM
agacugucaguucuaccugu

SEQ ID NO: 32707 - RNA, 20 nt, Artificial Sequence
  HTT spacer sequence TTCN PAM
accuguuggucuuuaugucg

SEQ ID NO: 32708 - RNA, 20 nt, Artificial Sequence
  HTT spacer sequence TTCN PAM
guaaucaagacuguauggua

SEQ ID NO: 32709 - RNA, 20 nt, Artificial Sequence
  HTT spacer sequence TTCN PAM
ugaaaugugaguucuccaac

SEQ ID NO: 32710 - RNA, 20 nt, Artificial Sequence
  HTT spacer sequence TTCN PAM
ugaauuuaaacugugacaca

SEQ ID NO: 32711 - RNA, 20 nt, Artificial Sequence
  HTT spacer sequence TTCN PAM
ccaacuuuguuccuuuucaa

SEQ ID NO: 32712 - RNA, 20 nt, Artificial Sequence
  HTT spacer sequence TTCN PAM
uuuucaagauugauuuggcc

SEQ ID NO: 32713 - RNA, 20 nt, Artificial Sequence
  HTT spacer sequence TTCN PAM
agauugauuuggccaugcug

SEQ ID NO: 32714 - RNA, 20 nt, Artificial Sequence
  HTT spacer sequence TTCN PAM
guacgaauuguaggaucagc

SEQ ID NO: 32715 - RNA, 20 nt, Artificial Sequence
  HTT spacer sequence TTCN PAM
uacggaaaugcaagggaccc

SEQ ID NO: 32716 - RNA, 20 nt, Artificial Sequence
  HTT spacer sequence TTCN PAM
acaaagaagccaaguaggau

SEQ ID NO: 32717 - RNA, 20 nt, Artificial Sequence
  HTT spacer sequence TTCN PAM
uuguugaaacugacaagcug

SEQ ID NO: 32718 - RNA, 20 nt, Artificial Sequence
  HTT spacer sequence TTCN PAM
gagagggauuguguugaauc

SEQ ID NO: 32719 - RNA, 20 nt, Artificial Sequence
  HTT spacer sequence TTCN PAM
acacaaucccucucagaauc

SEQ ID NO: 32720 - RNA, 20 nt, Artificial Sequence
  HTT spacer sequence TTCN PAM
caucuuaacaauauugucuu

SEQ ID NO: 32721 - RNA, 20 nt, Artificial Sequence
  HTT spacer sequence TTCN PAM
accuaugaacaugggcaaac

SEQ ID NO: 32722 - RNA, 20 nt, Artificial Sequence
  HTT spacer sequence TTCN PAM
uagguggaagacaauauugu

SEQ ID NO: 32723 - RNA, 20 nt, Artificial Sequence
  HTT spacer sequence TTCN PAM
ggcugugugggcacaguguc

SEQ ID NO: 32724 - RNA, 20 nt, Artificial Sequence
  HTT spacer sequence TTCN PAM
ugcuacaauggcagagccgc

SEQ ID NO: 32725 - RNA, 20 nt, Artificial Sequence
  HTT spacer sequence TTCN PAM
aauagaauuuuauuaaugac

SEQ ID NO: 32726 - RNA, 20 nt, Artificial Sequence
  HTT spacer sequence TTCN PAM
auuggaacacagacacucau

SEQ ID NO: 32727 - RNA, 20 nt, Artificial Sequence
  HTT spacer sequence TTCN PAM
uugucauuaauaaaauucua

SEQ ID NO: 32728 - RNA, 20 nt, Artificial Sequence
  HTT spacer sequence TTCN PAM
aacuuccuugucauuaauaa

SEQ ID NO: 32729 - RNA, 20 nt, Artificial Sequence
  HTT spacer sequence TTCN PAM
uauaauuuucaccugucaug

SEQ ID NO: 32730 - RNA, 20 nt, Artificial Sequence
  HTT spacer sequence TTCN PAM
ccugucaugagauaguauuu

SEQ ID NO: 32731 - RNA, 20 nt, Artificial Sequence
  HTT spacer sequence TTCN PAM
uagcuugugaacuagccaaa

SEQ ID NO: 32732 - RNA, 20 nt, Artificial Sequence
  HTT spacer sequence TTCN PAM
caagcuaagaaauguuuuua

SEQ ID NO: 32733 - RNA, 20 nt, Artificial Sequence
  HTT spacer sequence TTCN PAM
cacuccuagguuaaaauaug

SEQ ID NO: 32734 - RNA, 20 nt, Artificial Sequence
  HTT spacer sequence TTCN PAM
aaaugugguccuaucauauu

SEQ ID NO: 32735 - RNA, 20 nt, Artificial Sequence
  HTT spacer sequence TTCN PAM
uuuuuuuuuuuuuuuuuuuu

SEQ ID NO: 32736 - RNA, 20 nt, Artificial Sequence
  HTT spacer sequence TTCN PAM
cucuuguugcccaggcugga

SEQ ID NO: 32737 - RNA, 20 nt, Artificial Sequence
  HTT spacer sequence TTCN PAM
agacauucuccugcacggcc

SEQ ID NO: 32738 - RNA, 20 nt, Artificial Sequence
  HTT spacer sequence TTCN PAM
ccugcacggccucccuagua

SEQ ID NO: 32739 - RNA, 20 nt, Artificial Sequence
  HTT spacer sequence TTCN PAM
ccauguuggucaggcugguc

SEQ ID NO: 32740 - RNA, 20 nt, Artificial Sequence
  HTT spacer sequence TTCN PAM
agaccagccugaccaacaug

SEQ ID NO: 32741 - RNA, 20 nt, Artificial Sequence
  HTT spacer sequence TTCN PAM
agcagggugugguggcucac

SEQ ID NO: 32742 - RNA, 20 nt, Artificial Sequence
  HTT spacer sequence TTCN PAM
uuuuuggcuguuuuuguuuu

SEQ ID NO: 32743 - RNA, 20 nt, Artificial Sequence
  HTT spacer sequence TTCN PAM
aaacuaguuuaaaaaaaaaa

SEQ ID NO: 32744 - RNA, 20 nt, Artificial Sequence
  HTT spacer sequence TTCN PAM
agcagcacagaugaaaaaca

SEQ ID NO: 32745 - RNA, 20 nt, Artificial Sequence
  HTT spacer sequence TTCN PAM
ucugugcugcuugaagauau

SEQ ID NO: 32746 - RNA, 20 nt, Artificial Sequence
  HTT spacer sequence TTCN PAM
ugcaagucugucaucuuugu

SEQ ID NO: 32747 - RNA, 20 nt, Artificial Sequence
  HTT spacer sequence TTCN PAM
uaagaacaaaaguguuucuu

SEQ ID NO: 32748 - RNA, 20 nt, Artificial Sequence
  HTT spacer sequence TTCN PAM
uaggaaguuagacaaagaug

SEQ ID NO: 32749 - RNA, 20 nt, Artificial Sequence
  HTT spacer sequence TTCN PAM
ugugucuucuucccagauuu

SEQ ID NO: 32750 - RNA, 20 nt, Artificial Sequence
  HTT spacer sequence TTCN PAM
ucccagauuuuaauaugcau

SEQ ID NO: 32751 - RNA, 20 nt, Artificial Sequence
  HTT spacer sequence TTCN PAM
cagauuuuaauaugcauaua

SEQ ID NO: 32752 - RNA, 20 nt, Artificial Sequence
  HTT spacer sequence TTCN PAM
auagcaguaccuguaauucu

SEQ ID NO: 32753 - RNA, 20 nt, Artificial Sequence
  HTT spacer sequence TTCN PAM
uauuaauugcuauguaauau

SEQ ID NO: 32754 - RNA, 20 nt, Artificial Sequence
  HTT spacer sequence TTCN PAM
aaaauauuacauagcaauua

SEQ ID NO: 32755 - RNA, 20 nt, Artificial Sequence
  HTT spacer sequence TTCN PAM
uuuuaaaagaggacuuuugg

SEQ ID NO: 32756 - RNA, 20 nt, Artificial Sequence
  HTT spacer sequence TTCN PAM
acagccacaaaaaugugaga

SEQ ID NO: 32757 - RNA, 20 nt, Artificial Sequence
  HTT spacer sequence TTCN PAM
cucuaccuugagaagucccc

SEQ ID NO: 32758 - RNA, 20 nt, Artificial Sequence
  HTT spacer sequence TTCN PAM
caagguagagagaauauguc

SEQ ID NO: 32759 - RNA, 20 nt, Artificial Sequence
  HTT spacer sequence TTCN PAM
uguaaauaagucaaccacuu

SEQ ID NO: 32760 - RNA, 20 nt, Artificial Sequence
  HTT spacer sequence TTCN PAM
aagguaguuuaucaaguggu

SEQ ID NO: 32761 - RNA, 20 nt, Artificial Sequence
  HTT spacer sequence TTCN PAM
gacaacaaggaggaaaaaua

SEQ ID NO: 32762 - RNA, 20 nt, Artificial Sequence
  HTT spacer sequence TTCN PAM
uccuuguugucugaauaaga

SEQ ID NO: 32763 - RNA, 20 nt, Artificial Sequence
  HTT spacer sequence TTCN PAM
agcccccaaauugauccaau

SEQ ID NO: 32764 - RNA, 20 nt, Artificial Sequence
  HTT spacer sequence TTCN PAM
gugagugacuuacaugcaca

SEQ ID NO: 32765 - RNA, 20 nt, Artificial Sequence
  HTT spacer sequence TTCN PAM
caaacuccaaugugcaugua

SEQ ID NO: 32766 - RNA, 20 nt, Artificial Sequence
  HTT spacer sequence TTCN PAM
ucccaaaugcuugcauuguu

SEQ ID NO: 32767 - RNA, 20 nt, Artificial Sequence
  HTT spacer sequence TTCN PAM
guagcugugaugagugagcu

SEQ ID NO: 32768 - RNA, 20 nt, Artificial Sequence
  HTT spacer sequence TTCN PAM
ucuaagcgagucccacuacc

SEQ ID NO: 32769 - RNA, 20 nt, Artificial Sequence
  HTT spacer sequence TTCN PAM
aguucaucuaagcgaguccc

SEQ ID NO: 32770 - RNA, 20 nt, Artificial Sequence
  HTT spacer sequence TTCN PAM
ucugagcagccacuauggag

SEQ ID NO: 32771 - RNA, 20 nt, Artificial Sequence
  HTT spacer sequence TTCN PAM
ccauaguggcugcucagaug

SEQ ID NO: 32772 - RNA, 20 nt, Artificial Sequence
  HTT spacer sequence TTCN PAM
guuguuuuucuccauagugg

SEQ ID NO: 32773 - RNA, 20 nt, Artificial Sequence
  HTT spacer sequence TTCN PAM
aaccacagcucuccuuugug

SEQ ID NO: 32774 - RNA, 20 nt, Artificial Sequence
  HTT spacer sequence TTCN PAM
acucaaaugucaccuucuaa

SEQ ID NO: 32775 - RNA, 20 nt, Artificial Sequence
  HTT spacer sequence TTCN PAM
cccgcuauacacauggcuug

SEQ ID NO: 32776 - RNA, 20 nt, Artificial Sequence
  HTT spacer sequence TTCN PAM
guuaacucugccuggaccuc

SEQ ID NO: 32777 - RNA, 20 nt, Artificial Sequence
  HTT spacer sequence TTCN PAM
gccuucuguuaacucugccu

SEQ ID NO: 32778 - RNA, 20 nt, Artificial Sequence
  HTT spacer sequence TTCN PAM
auguuugagaaccaguaagg

SEQ ID NO: 32779 - RNA, 20 nt, Artificial Sequence
  HTT spacer sequence TTCN PAM
caaacauggaaagcauuucu

SEQ ID NO: 32780 - RNA, 20 nt, Artificial Sequence
  HTT spacer sequence TTCN PAM
gccacuggccuccuuacugg

SEQ ID NO: 32781 - RNA, 20 nt, Artificial Sequence
  HTT spacer sequence TTCN PAM
ccuuacuucagccacuggcc

SEQ ID NO: 32782 - RNA, 20 nt, Artificial Sequence
  HTT spacer sequence TTCN PAM
gcccuucaccuuacuucagc

SEQ ID NO: 32783 - RNA, 20 nt, Artificial Sequence
  HTT spacer sequence TTCN PAM
ugccuguaauaccaguaguu

SEQ ID NO: 32784 - RNA, 20 nt, Artificial Sequence
  HTT spacer sequence TTCN PAM
ucuaaaugcauauauauaca

SEQ ID NO: 32785 - RNA, 20 nt, Artificial Sequence
  HTT spacer sequence TTCN PAM
aaauccucaccagcaugugg

SEQ ID NO: 32786 - RNA, 20 nt, Artificial Sequence
  HTT spacer sequence TTCN PAM
caccagcaauaagugaccua

SEQ ID NO: 32787 - RNA, 20 nt, Artificial Sequence
  HTT spacer sequence TTCN PAM
agaguggccguacuauauua

SEQ ID NO: 32788 - RNA, 20 nt, Artificial Sequence
  HTT spacer sequence TTCN PAM
guuuuaugacaaacugccaa

SEQ ID NO: 32789 - RNA, 20 nt, Artificial Sequence
  HTT spacer sequence TTCN PAM
cuaggauuaaugcccaggau

SEQ ID NO: 32790 - RNA, 20 nt, Artificial Sequence
  HTT spacer sequence TTCN PAM
uuucucuaggauuaaugccc

SEQ ID NO: 32791 - RNA, 20 nt, Artificial Sequence
  HTT spacer sequence TTCN PAM
cauaaaaaccuauacucaag

SEQ ID NO: 32792 - RNA, 20 nt, Artificial Sequence
  HTT spacer sequence TTCN PAM
uagauauuauggguaaagcu

SEQ ID NO: 32793 - RNA, 20 nt, Artificial Sequence
  HTT spacer sequence TTCN PAM
aguucuuagauauuaugggu

SEQ ID NO: 32794 - RNA, 20 nt, Artificial Sequence
  HTT spacer sequence TTCN PAM
acaggugaaugguuaaacua

SEQ ID NO: 32795 - RNA, 20 nt, Artificial Sequence
  HTT spacer sequence TTCN PAM
ccuguugaaggacaucugag

SEQ ID NO: 32796 - RNA, 20 nt, Artificial Sequence
  HTT spacer sequence TTCN PAM
uuuuuauuacugaguaguuu

SEQ ID NO: 32797 - RNA, 20 nt, Artificial Sequence
  HTT spacer sequence TTCN PAM
ccuaaacuguugcaugcuau

SEQ ID NO: 32798 - RNA, 20 nt, Artificial Sequence
  HTT spacer sequence TTCN PAM
uuagcauaacuucaccuaaa

SEQ ID NO: 32799 - RNA, 20 nt, Artificial Sequence
  HTT spacer sequence TTCN PAM
auguuuuuuugcaauggcac

SEQ ID NO: 32800 - RNA, 20 nt, Artificial Sequence
  HTT spacer sequence TTCN PAM
ccaucccuaaaacugugcca

SEQ ID NO: 32801 - RNA, 20 nt, Artificial Sequence
  HTT spacer sequence TTCN PAM
cuccucugccaccacuaacc

SEQ ID NO: 32802 - RNA, 20 nt, Artificial Sequence
  HTT spacer sequence TTCN PAM
ccucccucucuuuucucucc

SEQ ID NO: 32803 - RNA, 20 nt, Artificial Sequence
  HTT spacer sequence TTCN PAM
ccuguguuguccuuuuauaa

SEQ ID NO: 32804 - RNA, 20 nt, Artificial Sequence
  HTT spacer sequence TTCN PAM
auuacaaguauuccccugug

SEQ ID NO: 32805 - RNA, 20 nt, Artificial Sequence
  HTT spacer sequence TTCN PAM
cacugcaaccucugccuccu

SEQ ID NO: 32806 - RNA, 20 nt, Artificial Sequence
  HTT spacer sequence TTCN PAM
agugauacuugugucucagu

SEQ ID NO: 32807 - RNA, 20 nt, Artificial Sequence
  HTT spacer sequence TTCN PAM
gagugaaacaaaccagaggu

SEQ ID NO: 32808 - RNA, 20 nt, Artificial Sequence
  HTT spacer sequence TTCN PAM
cucugaacaugggagacuga

SEQ ID NO: 32809 - RNA, 20 nt, Artificial Sequence
  HTT spacer sequence TTCN PAM
uccaaauaauccaacacaca

SEQ ID NO: 32810 - RNA, 20 nt, Artificial Sequence
  HTT spacer sequence TTCN PAM
agaccagccgggccaacaug

SEQ ID NO: 32811 - RNA, 20 nt, Artificial Sequence
  HTT spacer sequence TTCN PAM
ucauguuggcccggcugguc

SEQ ID NO: 32812 - RNA, 20 nt, Artificial Sequence
  HTT spacer sequence TTCN PAM
cuugccucagccucccaagu

SEQ ID NO: 32813 - RNA, 20 nt, Artificial Sequence
  HTT spacer sequence TTCN PAM
agcaguucucuugccucagc

SEQ ID NO: 32814 - RNA, 20 nt, Artificial Sequence
  HTT spacer sequence TTCN PAM
gccugugugacagaguaaga

SEQ ID NO: 32815 - RNA, 20 nt, Artificial Sequence
  HTT spacer sequence TTCN PAM
ccguguuagccgggaugguc

SEQ ID NO: 32816 - RNA, 20 nt, Artificial Sequence
  HTT spacer sequence TTCN PAM
gccucccaaguagcugggac

SEQ ID NO: 32817 - RNA, 20 nt, Artificial Sequence
  HTT spacer sequence TTCN PAM
ccugcuucagccucccaagu

SEQ ID NO: 32818 - RNA, 20 nt, Artificial Sequence
  HTT spacer sequence TTCN PAM
caccauucuccugcuucagc

SEQ ID NO: 32819 - RNA, 20 nt, Artificial Sequence
  HTT spacer sequence TTCN PAM
cccgagacggagucuugcuc

SEQ ID NO: 32820 - RNA, 20 nt, Artificial Sequence
  HTT spacer sequence TTCN PAM
auuuauuuauuuuuuuuuuu

SEQ ID NO: 32821 - RNA, 20 nt, Artificial Sequence
  HTT spacer sequence TTCN PAM
ccaggcuagagugcaauggc

SEQ ID NO: 32822 - RNA, 20 nt, Artificial Sequence
  HTT spacer sequence TTCN PAM
agcaguucuucugccgcagc

SEQ ID NO: 32823 - RNA, 20 nt, Artificial Sequence
  HTT spacer sequence TTCN PAM
ucugccgcagccucccgagu

SEQ ID NO: 32824 - RNA, 20 nt, Artificial Sequence
  HTT spacer sequence TTCN PAM
gccgcagccucccgaguagc

SEQ ID NO: 32825 - RNA, 20 nt, Artificial Sequence
  HTT spacer sequence TTCN PAM
ccaugcuggccaggcugguc

SEQ ID NO: 32826 - RNA, 20 nt, Artificial Sequence
  HTT spacer sequence TTCN PAM
agaccagccuggccagcaug

SEQ ID NO: 32827 - RNA, 20 nt, Artificial Sequence
  HTT spacer sequence TTCN PAM
aaauuaaaacaaacggccag

SEQ ID NO: 32828 - RNA, 20 nt, Artificial Sequence
  HTT spacer sequence TTCN PAM
ccuucaaaauuaaaacaaac

SEQ ID NO: 32829 - RNA, 20 nt, Artificial Sequence
  HTT spacer sequence TTCN PAM
cuucaccuucaaaauuaaaa

SEQ ID NO: 32830 - RNA, 20 nt, Artificial Sequence
  HTT spacer sequence TTCN PAM
aucacuuuugguaaauguag

SEQ ID NO: 32831 - RNA, 20 nt, Artificial Sequence
  HTT spacer sequence TTCN PAM
uacccuguuuuuccaguucu

SEQ ID NO: 32832 - RNA, 20 nt, Artificial Sequence
  HTT spacer sequence TTCN PAM
aguucuugcucagagcaagg

SEQ ID NO: 32833 - RNA, 20 nt, Artificial Sequence
  HTT spacer sequence TTCN PAM
ugcucagagcaaggugguuu

SEQ ID NO: 32834 - RNA, 20 nt, Artificial Sequence
  HTT spacer sequence TTCN PAM
uuuucacuuaaucaccauac

SEQ ID NO: 32835 - RNA, 20 nt, Artificial Sequence
  HTT spacer sequence TTCN PAM
cuuaaucaccauacuuacuu

SEQ ID NO: 32836 - RNA, 20 nt, Artificial Sequence
  HTT spacer sequence TTCN PAM
uguagaacaagucaguuuga

SEQ ID NO: 32837 - RNA, 20 nt, Artificial Sequence
  HTT spacer sequence TTCN PAM
acaugaaaaguaaguauggu

SEQ ID NO: 32838 - RNA, 20 nt, Artificial Sequence
  HTT spacer sequence TTCN PAM
ucaucuuaacuaaauuccau

SEQ ID NO: 32839 - RNA, 20 nt, Artificial Sequence
  HTT spacer sequence TTCN PAM
augggggaaggaauuaguuu

SEQ ID NO: 32840 - RNA, 20 nt, Artificial Sequence
  HTT spacer sequence TTCN PAM
cccauggaauuuaguuaaga

SEQ ID NO: 32841 - RNA, 20 nt, Artificial Sequence
  HTT spacer sequence TTCN PAM
uucccccauggaauuuaguu

SEQ ID NO: 32842 - RNA, 20 nt, Artificial Sequence
  HTT spacer sequence TTCN PAM
uaaacuuccagguuugcuua

SEQ ID NO: 32843 - RNA, 20 nt, Artificial Sequence
  HTT spacer sequence TTCN PAM
agguuugcuuauuggacaaa

SEQ ID NO: 32844 - RNA, 20 nt, Artificial Sequence
  HTT spacer sequence TTCN PAM
uugguaauacaauuuucuca

SEQ ID NO: 32845 - RNA, 20 nt, Artificial Sequence
  HTT spacer sequence TTCN PAM
cagaaacuuaguagucuuuu

SEQ ID NO: 32846 - RNA, 20 nt, Artificial Sequence
  HTT spacer sequence TTCN PAM
gagaaaauuguauuaccaaa

SEQ ID NO: 32847 - RNA, 20 nt, Artificial Sequence
  HTT spacer sequence TTCN PAM
caguuggcacuaucaaaaua

SEQ ID NO: 32848 - RNA, 20 nt, Artificial Sequence
  HTT spacer sequence TTCN PAM
gaugucuucacaguuggcac

SEQ ID NO: 32849 - RNA, 20 nt, Artificial Sequence
  HTT spacer sequence TTCN PAM
cauccaaaccuauggcuuca

SEQ ID NO: 32850 - RNA, 20 nt, Artificial Sequence
  HTT spacer sequence TTCN PAM
ccaggcuguuuaucuccuuu

SEQ ID NO: 32851 - RNA, 20 nt, Artificial Sequence
  HTT spacer sequence TTCN PAM
cagccaagcaaaaggagaua

SEQ ID NO: 32852 - RNA, 20 nt, Artificial Sequence
  HTT spacer sequence TTCN PAM
cagcuauuuggggacauaga

SEQ ID NO: 32853 - RNA, 20 nt, Artificial Sequence
  HTT spacer sequence TTCN PAM
auguccccaaauagcuggga

SEQ ID NO: 32854 - RNA, 20 nt, Artificial Sequence
  HTT spacer sequence TTCN PAM
caaaaucguuaacugacuac

SEQ ID NO: 32855 - RNA, 20 nt, Artificial Sequence
  HTT spacer sequence TTCN PAM
guucucaaaaucguuaacug

SEQ ID NO: 32856 - RNA, 20 nt, Artificial Sequence
  HTT spacer sequence TTCN PAM
ucuaauugaauuucccaucu

SEQ ID NO: 32857 - RNA, 20 nt, Artificial Sequence
  HTT spacer sequence TTCN PAM
aauugaauuucccaucucuu

SEQ ID NO: 32858 - RNA, 20 nt, Artificial Sequence
  HTT spacer sequence TTCN PAM
auuagaagaaacacagucua

SEQ ID NO: 32859 - RNA, 20 nt, Artificial Sequence
  HTT spacer sequence TTCN PAM
caucucuuguaaucuaugcc

SEQ ID NO: 32860 - RNA, 20 nt, Artificial Sequence
  HTT spacer sequence TTCN PAM
guacugcugagaaagaaaga

SEQ ID NO: 32861 - RNA, 20 nt, Artificial Sequence
  HTT spacer sequence TTCN PAM
cagcaguacagaagaugaug

SEQ ID NO: 32862 - RNA, 20 nt, Artificial Sequence
  HTT spacer sequence TTCN PAM
uucucagcaguacagaagau

SEQ ID NO: 32863 - RNA, 20 nt, Artificial Sequence
  HTT spacer sequence TTCN PAM
uucuuucucagcaguacaga

SEQ ID NO: 32864 - RNA, 20 nt, Artificial Sequence
  HTT spacer sequence TTCN PAM
aaucaaacuauaccacuggu

SEQ ID NO: 32865 - RNA, 20 nt, Artificial Sequence
  HTT spacer sequence TTCN PAM
aacgugaaauugauugagua

SEQ ID NO: 32866 - RNA, 20 nt, Artificial Sequence
  HTT spacer sequence TTCN PAM
cguuugaaucauguguuaac

SEQ ID NO: 32867 - RNA, 20 nt, Artificial Sequence
  HTT spacer sequence TTCN PAM
ccaauacucaaucaauuuca

SEQ ID NO: 32868 - RNA, 20 nt, Artificial Sequence
  HTT spacer sequence TTCN PAM
ggcuuuaaaucuccucugua

SEQ ID NO: 32869 - RNA, 20 nt, Artificial Sequence
  HTT spacer sequence TTCN PAM
uaucugugugaucuugggca

SEQ ID NO: 32870 - RNA, 20 nt, Artificial Sequence
  HTT spacer sequence TTCN PAM
auuucuucucucuauaaugg

SEQ ID NO: 32871 - RNA, 20 nt, Artificial Sequence
  HTT spacer sequence TTCN PAM
ucucucuauaaugggggaag

SEQ ID NO: 32872 - RNA, 20 nt, Artificial Sequence
  HTT spacer sequence TTCN PAM
cucuauaaugggggaaguga

SEQ ID NO: 32873 - RNA, 20 nt, Artificial Sequence
  HTT spacer sequence TTCN PAM
cccauuauagagagaagaaa

SEQ ID NO: 32874 - RNA, 20 nt, Artificial Sequence
  HTT spacer sequence TTCN PAM
caucuuggccucccaaagca

SEQ ID NO: 32875 - RNA, 20 nt, Artificial Sequence
  HTT spacer sequence TTCN PAM
aaauauuuuguagagacggg

SEQ ID NO: 32876 - RNA, 20 nt, Artificial Sequence
  HTT spacer sequence TTCN PAM
gccuaggaguuuaaggcuaa

SEQ ID NO: 32877 - RNA, 20 nt, Artificial Sequence
  HTT spacer sequence TTCN PAM
cccauuuuacuuuauuuuac

SEQ ID NO: 32878 - RNA, 20 nt, Artificial Sequence
  HTT spacer sequence TTCN PAM
uuucccccauuuuacuuuau

SEQ ID NO: 32879 - RNA, 20 nt, Artificial Sequence
  HTT spacer sequence TTCN PAM
gugagcagcguagcuugaca

SEQ ID NO: 32880 - RNA, 20 nt, Artificial Sequence
  HTT spacer sequence TTCN PAM
ccaauggcugucaagcuacg

SEQ ID NO: 32881 - RNA, 20 nt, Artificial Sequence
  HTT spacer sequence TTCN PAM
cuguccagauccccauucug

SEQ ID NO: 32882 - RNA, 20 nt, Artificial Sequence
  HTT spacer sequence TTCN PAM
gcccgcaacauggaguauaa

SEQ ID NO: 32883 - RNA, 20 nt, Artificial Sequence
  HTT spacer sequence TTCN PAM
uaguagucgagaaacacuca

SEQ ID NO: 32884 - RNA, 20 nt, Artificial Sequence
  HTT spacer sequence TTCN PAM
cgacuacuaugaauaaaccg

SEQ ID NO: 32885 - RNA, 20 nt, Artificial Sequence
  HTT spacer sequence TTCN PAM
gugaguguuucucgacuacu

SEQ ID NO: 32886 - RNA, 20 nt, Artificial Sequence
  HTT spacer sequence TTCN PAM
uucagugaguguuucucgac

SEQ ID NO: 32887 - RNA, 20 nt, Artificial Sequence
  HTT spacer sequence TTCN PAM
uucauucagugaguguuucu

SEQ ID NO: 32888 - RNA, 20 nt, Artificial Sequence
  HTT spacer sequence TTCN PAM
acaccucauucauucauuca

SEQ ID NO: 32889 - RNA, 20 nt, Artificial Sequence
  HTT spacer sequence TTCN PAM
acacauauuaauuuccuucu

SEQ ID NO: 32890 - RNA, 20 nt, Artificial Sequence
  HTT spacer sequence TTCN PAM
uucuuuuuuuuauuuuuaga

SEQ ID NO: 32891 - RNA, 20 nt, Artificial Sequence
  HTT spacer sequence TTCN PAM
uuuuuuuauuuuuagaaaga

SEQ ID NO: 32892 - RNA, 20 nt, Artificial Sequence
  HTT spacer sequence TTCN PAM
aaaaauaaaaaaaagaagga

SEQ ID NO: 32893 - RNA, 20 nt, Artificial Sequence
  HTT spacer sequence TTCN PAM
uucuaaaaauaaaaaaaaga

SEQ ID NO: 32894 - RNA, 20 nt, Artificial Sequence
  HTT spacer sequence TTCN PAM
uucuuucuaaaaauaaaaaa

SEQ ID NO: 32895 - RNA, 20 nt, Artificial Sequence
  HTT spacer sequence TTCN PAM
gcuaccaagaaagaccgugu

SEQ ID NO: 32896 - RNA, 20 nt, Artificial Sequence
  HTT spacer sequence TTCN PAM
ugguagcugaaaguucuuuc

SEQ ID NO: 32897 - RNA, 20 nt, Artificial Sequence
  HTT spacer sequence TTCN PAM
cacggucuuucuugguagcu

SEQ ID NO: 32898 - RNA, 20 nt, Artificial Sequence
  HTT spacer sequence TTCN PAM
cauauugucagacaaugauu

SEQ ID NO: 32899 - RNA, 20 nt, Artificial Sequence
  HTT spacer sequence TTCN PAM
aagugcaauuaccugacaga

SEQ ID NO: 32900 - RNA, 20 nt, Artificial Sequence
  HTT spacer sequence TTCN PAM
cuagacaguucaaagugcaa

SEQ ID NO: 32901 - RNA, 20 nt, Artificial Sequence
  HTT spacer sequence TTCN PAM
uauuuucucuagacaguuca

SEQ ID NO: 32902 - RNA, 20 nt, Artificial Sequence
  HTT spacer sequence TTCN PAM
gucuuaaugggcuagaauau

SEQ ID NO: 32903 - RNA, 20 nt, Artificial Sequence
  HTT spacer sequence TTCN PAM
agcccauuaagacugaaaau

SEQ ID NO: 32904 - RNA, 20 nt, Artificial Sequence
  HTT spacer sequence TTCN PAM
uugugucccagcuauuuuaa

SEQ ID NO: 32905 - RNA, 20 nt, Artificial Sequence
  HTT spacer sequence TTCN PAM
gaaauccauuuaagaugaag

SEQ ID NO: 32906 - RNA, 20 nt, Artificial Sequence
  HTT spacer sequence TTCN PAM
gaauccauuuaaaauagcug

SEQ ID NO: 32907 - RNA, 20 nt, Artificial Sequence
  HTT spacer sequence TTCN PAM
ucuuaaauggauuucugaau

SEQ ID NO: 32908 - RNA, 20 nt, Artificial Sequence
  HTT spacer sequence TTCN PAM
ucaucuuaaauggauuucug

SEQ ID NO: 32909 - RNA, 20 nt, Artificial Sequence
  HTT spacer sequence TTCN PAM
cauauuucuggcuauauaca

SEQ ID NO: 32910 - RNA, 20 nt, Artificial Sequence
  HTT spacer sequence TTCN PAM
ggcuauauacaaggauaucc

SEQ ID NO: 32911 - RNA, 20 nt, Artificial Sequence
  HTT spacer sequence TTCN PAM
gugucuggauauccuuguau

SEQ ID NO: 32912 - RNA, 20 nt, Artificial Sequence
  HTT spacer sequence TTCN PAM
uuucagugucuggauauccu

SEQ ID NO: 32913 - RNA, 20 nt, Artificial Sequence
  HTT spacer sequence TTCN PAM
cuuuuuguaaucuuuuaugc

SEQ ID NO: 32914 - RNA, 20 nt, Artificial Sequence
  HTT spacer sequence TTCN PAM
auuaccauaaugguuuuaau

SEQ ID NO: 32915 - RNA, 20 nt, Artificial Sequence
  HTT spacer sequence TTCN PAM
uacuauugcaacaaaugcaa

SEQ ID NO: 32916 - RNA, 20 nt, Artificial Sequence
  HTT spacer sequence TTCN PAM
guuugucucucuuauuugcu

SEQ ID NO: 32917 - RNA, 20 nt, Artificial Sequence
  HTT spacer sequence TTCN PAM
uggcaguuugcuguccuauu

SEQ ID NO: 32918 - RNA, 20 nt, Artificial Sequence
  HTT spacer sequence TTCN PAM
ggauuaguggggaucguggg

SEQ ID NO: 32919 - RNA, 20 nt, Artificial Sequence
  HTT spacer sequence TTCN PAM
uugcuugaucuuucucacug

SEQ ID NO: 32920 - RNA, 20 nt, Artificial Sequence
  HTT spacer sequence TTCN PAM
cacugggaugaacuagcagc

SEQ ID NO: 32921 - RNA, 20 nt, Artificial Sequence
  HTT spacer sequence TTCN PAM
ucccagugagaaagaucaag

SEQ ID NO: 32922 - RNA, 20 nt, Artificial Sequence
  HTT spacer sequence TTCN PAM
uuuguagcugcuuugcuuuu

SEQ ID NO: 32923 - RNA, 20 nt, Artificial Sequence
  HTT spacer sequence TTCN PAM
gaccguuguuccuaguagcu

SEQ ID NO: 32924 - RNA, 20 nt, Artificial Sequence
  HTT spacer sequence TTCN PAM
uaguagcuguagaugguaaa

SEQ ID NO: 32925 - RNA, 20 nt, Artificial Sequence
  HTT spacer sequence TTCN PAM
aauggcucaguaggagacau

SEQ ID NO: 32926 - RNA, 20 nt, Artificial Sequence
  HTT spacer sequence TTCN PAM
ccuaugauaucugaauucug

SEQ ID NO: 32927 - RNA, 20 nt, Artificial Sequence
  HTT spacer sequence TTCN PAM
gauaucauaggugaauaugu

SEQ ID NO: 32928 - RNA, 20 nt, Artificial Sequence
  HTT spacer sequence TTCN PAM
guuacccacaugggcaugcg

SEQ ID NO: 32929 - RNA, 20 nt, Artificial Sequence
  HTT spacer sequence TTCN PAM
cgcaugcccauguggguaac

SEQ ID NO: 32930 - RNA, 20 nt, Artificial Sequence
  HTT spacer sequence TTCN PAM
cuuggaauaaauaauucaug

SEQ ID NO: 32931 - RNA, 20 nt, Artificial Sequence
  HTT spacer sequence TTCN PAM
aagggaaaguaaggcaaggc

SEQ ID NO: 32932 - RNA, 20 nt, Artificial Sequence
  HTT spacer sequence TTCN PAM
uguuauucuccugguagaag

SEQ ID NO: 32933 - RNA, 20 nt, Artificial Sequence
  HTT spacer sequence TTCN PAM
ccugguagaagcuagaaaaa

SEQ ID NO: 32934 - RNA, 20 nt, Artificial Sequence
  HTT spacer sequence TTCN PAM
accaggagaauaacaugaau

SEQ ID NO: 32935 - RNA, 20 nt, Artificial Sequence
  HTT spacer sequence TTCN PAM
agcuucuaccaggagaauaa

SEQ ID NO: 32936 - RNA, 20 nt, Artificial Sequence
  HTT spacer sequence TTCN PAM
gacugacuauaaaggcuuuu

SEQ ID NO: 32937 - RNA, 20 nt, Artificial Sequence
  HTT spacer sequence TTCN PAM
uuuuuuaauuuuuuuuugag

SEQ ID NO: 32938 - RNA, 20 nt, Artificial Sequence
  HTT spacer sequence TTCN PAM
cucuuguugcccaggcugga

SEQ ID NO: 32939 - RNA, 20 nt, Artificial Sequence
  HTT spacer sequence TTCN PAM
agugauucuccugccucagc

SEQ ID NO: 32940 - RNA, 20 nt, Artificial Sequence
  HTT spacer sequence TTCN PAM
ccugccucagccucccaagu

SEQ ID NO: 32941 - RNA, 20 nt, Artificial Sequence
  HTT spacer sequence TTCN PAM
agaucagccugaccaacauc

SEQ ID NO: 32942 - RNA, 20 nt, Artificial Sequence
  HTT spacer sequence TTCN PAM
uuuguuuuuucaaaaaauuu

SEQ ID NO: 32943 - RNA, 20 nt, Artificial Sequence
  HTT spacer sequence TTCN PAM
aaaaauuuccucuuggccau

SEQ ID NO: 32944 - RNA, 20 nt, Artificial Sequence
  HTT spacer sequence TTCN PAM
ucuuggccauugcuuuucac

SEQ ID NO: 32945 - RNA, 20 nt, Artificial Sequence
  HTT spacer sequence TTCN PAM
cuuuuguuuuuuuuuuuuuu

SEQ ID NO: 32946 - RNA, 20 nt, Artificial Sequence
  HTT spacer sequence TTCN PAM
cgccauucuccugcuucagc

SEQ ID NO: 32947 - RNA, 20 nt, Artificial Sequence
  HTT spacer sequence TTCN PAM
ccugcuucagccuggcgagu

SEQ ID NO: 32948 - RNA, 20 nt, Artificial Sequence
  HTT spacer sequence TTCN PAM
gccuggcgaguagcugggac

SEQ ID NO: 32949 - RNA, 20 nt, Artificial Sequence
  HTT spacer sequence TTCN PAM
ccguggucuugaucuccuga

SEQ ID NO: 32950 - RNA, 20 nt, Artificial Sequence
  HTT spacer sequence TTCN PAM
guauauauauucguaauguu

SEQ ID NO: 32951 - RNA, 20 nt, Artificial Sequence
  HTT spacer sequence TTCN PAM
uaauguuguacagccaucac

SEQ ID NO: 32952 - RNA, 20 nt, Artificial Sequence
  HTT spacer sequence TTCN PAM
uaaguuuuucuucugucaaa

SEQ ID NO: 32953 - RNA, 20 nt, Artificial Sequence
  HTT spacer sequence TTCN PAM
ucugucaaaacugaacaucu

SEQ ID NO: 32954 - RNA, 20 nt, Artificial Sequence
  HTT spacer sequence TTCN PAM
gucaaaacugaacaucuguc

SEQ ID NO: 32955 - RNA, 20 nt, Artificial Sequence
  HTT spacer sequence TTCN PAM
guuuugacagaagaaaaacu

SEQ ID NO: 32956 - RNA, 20 nt, Artificial Sequence
  HTT spacer sequence TTCN PAM
uuaaacucccuaucauccau

SEQ ID NO: 32957 - RNA, 20 nt, Artificial Sequence
  HTT spacer sequence TTCN PAM
uuccuguagucccuuucuac

SEQ ID NO: 32958 - RNA, 20 nt, Artificial Sequence
  HTT spacer sequence TTCN PAM
uguagucccuuucuacuuuc

SEQ ID NO: 32959 - RNA, 20 nt, Artificial Sequence
  HTT spacer sequence TTCN PAM
acuuucugucuguaugagug

SEQ ID NO: 32960 - RNA, 20 nt, Artificial Sequence
  HTT spacer sequence TTCN PAM
gucuguaugaguguaacugc

SEQ ID NO: 32961 - RNA, 20 nt, Artificial Sequence
  HTT spacer sequence TTCN PAM
uacaggauuuguguuuuuuu

SEQ ID NO: 32962 - RNA, 20 nt, Artificial Sequence
  HTT spacer sequence TTCN PAM
aagugauuucacaaaaccgu

SEQ ID NO: 32963 - RNA, 20 nt, Artificial Sequence
  HTT spacer sequence TTCN PAM
caaaaccguuucauuuuagg

SEQ ID NO: 32964 - RNA, 20 nt, Artificial Sequence
  HTT spacer sequence TTCN PAM
uuuuagguuaacucauuucu

SEQ ID NO: 32965 - RNA, 20 nt, Artificial Sequence
  HTT spacer sequence TTCN PAM
guuguuugugaaauacugug

SEQ ID NO: 32966 - RNA, 20 nt, Artificial Sequence
  HTT spacer sequence TTCN PAM
caaacaacagaaaugaguua

SEQ ID NO: 32967 - RNA, 20 nt, Artificial Sequence
  HTT spacer sequence TTCN PAM
guucuguuucugucuaauuu

SEQ ID NO: 32968 - RNA, 20 nt, Artificial Sequence
  HTT spacer sequence TTCN PAM
guuucugucuaauuugugga

SEQ ID NO: 32969 - RNA, 20 nt, Artificial Sequence
  HTT spacer sequence TTCN PAM
gucuaauuuguggaaauguu

SEQ ID NO: 32970 - RNA, 20 nt, Artificial Sequence
  HTT spacer sequence TTCN PAM
acaaauuagacagaaacaga

SEQ ID NO: 32971 - RNA, 20 nt, Artificial Sequence
  HTT spacer sequence TTCN PAM
cacaacauuuccacaaauua

SEQ ID NO: 32972 - RNA, 20 nt, Artificial Sequence
  HTT spacer sequence TTCN PAM
ucccacaacauuuccacaaa

SEQ ID NO: 32973 - RNA, 20 nt, Artificial Sequence
  HTT spacer sequence TTCN PAM
uuuucuucccacaacauuuc

SEQ ID NO: 32974 - RNA, 20 nt, Artificial Sequence
  HTT spacer sequence TTCN PAM
ggacauaugcucauuuguua

SEQ ID NO: 32975 - RNA, 20 nt, Artificial Sequence
  HTT spacer sequence TTCN PAM
aaguuagcaugcuauuguag

SEQ ID NO: 32976 - RNA, 20 nt, Artificial Sequence
  HTT spacer sequence TTCN PAM
acaauagcaugcuaacuuag

SEQ ID NO: 32977 - RNA, 20 nt, Artificial Sequence
  HTT spacer sequence TTCN PAM
uacuuuuaucauagcguugu

SEQ ID NO: 32978 - RNA, 20 nt, Artificial Sequence
  HTT spacer sequence TTCN PAM
aaccuuuuuuuuuccuacuu

SEQ ID NO: 32979 - RNA, 20 nt, Artificial Sequence
  HTT spacer sequence TTCN PAM
aucucugcuaccuguguaag

SEQ ID NO: 32980 - RNA, 20 nt, Artificial Sequence
  HTT spacer sequence TTCN PAM
aaaaugagccaguaaggcuc

SEQ ID NO: 32981 - RNA, 20 nt, Artificial Sequence
  HTT spacer sequence TTCN PAM
ugugggaucagaugguacau

SEQ ID NO: 32982 - RNA, 20 nt, Artificial Sequence
  HTT spacer sequence TTCN PAM
cauguaccaucugaucccac

SEQ ID NO: 32983 - RNA, 20 nt, Artificial Sequence
  HTT spacer sequence TTCN PAM
caguguuucacauguaccau

SEQ ID NO: 32984 - RNA, 20 nt, Artificial Sequence
  HTT spacer sequence TTCN PAM
uuagccaccugagcgggaag

SEQ ID NO: 32985 - RNA, 20 nt, Artificial Sequence
  HTT spacer sequence TTCN PAM
cgcucagguggcuaaugaac

SEQ ID NO: 32986 - RNA, 20 nt, Artificial Sequence
  HTT spacer sequence TTCN PAM
cgcuauucuccugccccagc

SEQ ID NO: 32987 - RNA, 20 nt, Artificial Sequence
  HTT spacer sequence TTCN PAM
ccugccccagccucccaagu

SEQ ID NO: 32988 - RNA, 20 nt, Artificial Sequence
  HTT spacer sequence TTCN PAM
ccguguuagccaggaugguc

SEQ ID NO: 32989 - RNA, 20 nt, Artificial Sequence
  HTT spacer sequence TTCN PAM
caaaaaaaguaaagauggcc

SEQ ID NO: 32990 - RNA, 20 nt, Artificial Sequence
  HTT spacer sequence TTCN PAM
ucugaucuccaccauccagg

SEQ ID NO: 32991 - RNA, 20 nt, Artificial Sequence
  HTT spacer sequence TTCN PAM
cugagaccuggaugguggag

SEQ ID NO: 32992 - RNA, 20 nt, Artificial Sequence
  HTT spacer sequence TTCN PAM
cucugaaagcuuauugaccc

SEQ ID NO: 32993 - RNA, 20 nt, Artificial Sequence
  HTT spacer sequence TTCN PAM
gagagaaauuauguucucug

SEQ ID NO: 32994 - RNA, 20 nt, Artificial Sequence
  HTT spacer sequence TTCN PAM
ugggucaauaagcuuucaga

SEQ ID NO: 32995 - RNA, 20 nt, Artificial Sequence
  HTT spacer sequence TTCN PAM
aucugagugcgucaggcuuu

SEQ ID NO: 32996 - RNA, 20 nt, Artificial Sequence
  HTT spacer sequence TTCN PAM
ugucauuuugucuuuugaua

SEQ ID NO: 32997 - RNA, 20 nt, Artificial Sequence
  HTT spacer sequence TTCN PAM
aauggaauucauggaauguu

SEQ ID NO: 32998 - RNA, 20 nt, Artificial Sequence
  HTT spacer sequence TTCN PAM
auuugaaaauuaucaaaaga

SEQ ID NO: 32999 - RNA, 20 nt, Artificial Sequence
  HTT spacer sequence TTCN PAM
uggaauguuggcuuauauuc

SEQ ID NO: 33000 - RNA, 20 nt, Artificial Sequence
  HTT spacer sequence TTCN PAM
augaauuccauuugaaaauu

SEQ ID NO: 33001 - RNA, 20 nt, Artificial Sequence
  HTT spacer sequence TTCN PAM
uauauuaguaaaguauguug

SEQ ID NO: 33002 - RNA, 20 nt, Artificial Sequence
  HTT spacer sequence TTCN PAM
auaugccauauuaaaucaaa

SEQ ID NO: 33003 - RNA, 20 nt, Artificial Sequence
  HTT spacer sequence TTCN PAM
cauuagucugucucuuguuu

SEQ ID NO: 33004 - RNA, 20 nt, Artificial Sequence
  HTT spacer sequence TTCN PAM
uuaugcuuguucuacagaag

SEQ ID NO: 33005 - RNA, 20 nt, Artificial Sequence
  HTT spacer sequence TTCN PAM
acagaagagcauguuaaaag

SEQ ID NO: 33006 - RNA, 20 nt, Artificial Sequence
  HTT spacer sequence TTCN PAM
guagaacaagcauaaugaac

SEQ ID NO: 33007 - RNA, 20 nt, Artificial Sequence
  HTT spacer sequence TTCN PAM
ugguuucauaggauacacuc

SEQ ID NO: 33008 - RNA, 20 nt, Artificial Sequence
  HTT spacer sequence TTCN PAM
uaggauacacucuauacuuu

SEQ ID NO: 33009 - RNA, 20 nt, Artificial Sequence
  HTT spacer sequence TTCN PAM
gaguauauagcugaagguga

SEQ ID NO: 33010 - RNA, 20 nt, Artificial Sequence
  HTT spacer sequence TTCN PAM
gcuauauacucugaaauccc

SEQ ID NO: 33011 - RNA, 20 nt, Artificial Sequence
  HTT spacer sequence TTCN PAM
auaaaacauauuuacauaaa

SEQ ID NO: 33012 - RNA, 20 nt, Artificial Sequence
  HTT spacer sequence TTCN PAM
uguuaacucuccuaaaauau

SEQ ID NO: 33013 - RNA, 20 nt, Artificial Sequence
  HTT spacer sequence TTCN PAM
aaaaguuuaauuauauuuua

SEQ ID NO: 33014 - RNA, 20 nt, Artificial Sequence
  HTT spacer sequence TTCN PAM
gacguuuucaauguaggaag

SEQ ID NO: 33015 - RNA, 20 nt, Artificial Sequence
  HTT spacer sequence TTCN PAM
auguaggaagucauuuaaaa

SEQ ID NO: 33016 - RNA, 20 nt, Artificial Sequence
  HTT spacer sequence TTCN PAM
uacauugaaaacgucagaag

SEQ ID NO: 33017 - RNA, 20 nt, Artificial Sequence
  HTT spacer sequence TTCN PAM
uguauauugugaaaauguag

SEQ ID NO: 33018 - RNA, 20 nt, Artificial Sequence
  HTT spacer sequence TTCN PAM
caauauacaugaaguuuuaa

SEQ ID NO: 33019 - RNA, 20 nt, Artificial Sequence
  HTT spacer sequence TTCN PAM
uaaguauggaugagcaucaa

SEQ ID NO: 33020 - RNA, 20 nt, Artificial Sequence
  HTT spacer sequence TTCN PAM
agaugauuuugaugcucauc

SEQ ID NO: 33021 - RNA, 20 nt, Artificial Sequence
  HTT spacer sequence TTCN PAM
uuacuguauuuuuaacaaau

SEQ ID NO: 33022 - RNA, 20 nt, Artificial Sequence
  HTT spacer sequence TTCN PAM
caaacauacuucugcauucu

SEQ ID NO: 33023 - RNA, 20 nt, Artificial Sequence
  HTT spacer sequence TTCN PAM
gcauucuguuugaguaggua

SEQ ID NO: 33024 - RNA, 20 nt, Artificial Sequence
  HTT spacer sequence TTCN PAM
guuugaguagguagggacua

SEQ ID NO: 33025 - RNA, 20 nt, Artificial Sequence
  HTT spacer sequence TTCN PAM
caaguauccucuugggaaua

SEQ ID NO: 33026 - RNA, 20 nt, Artificial Sequence
  HTT spacer sequence TTCN PAM
caagaggauacuugugaaaa

SEQ ID NO: 33027 - RNA, 20 nt, Artificial Sequence
  HTT spacer sequence TTCN PAM
uggguauucccaagaggaua

SEQ ID NO: 33028 - RNA, 20 nt, Artificial Sequence
  HTT spacer sequence TTCN PAM
agcugauuuaugcuaauaua

SEQ ID NO: 33029 - RNA, 20 nt, Artificial Sequence
  HTT spacer sequence TTCN PAM
caguagcaccaauauaucga

SEQ ID NO: 33030 - RNA, 20 nt, Artificial Sequence
  HTT spacer sequence TTCN PAM
auauauuggugcuacuguga

SEQ ID NO: 33031 - RNA, 20 nt, Artificial Sequence
  HTT spacer sequence TTCN PAM
uuagaguucgauauauuggu

SEQ ID NO: 33032 - RNA, 20 nt, Artificial Sequence
  HTT spacer sequence TTCN PAM
guuaauguuucugaaagaua

SEQ ID NO: 33033 - RNA, 20 nt, Artificial Sequence
  HTT spacer sequence TTCN PAM
gaaagauauaggugaccacu

SEQ ID NO: 33034 - RNA, 20 nt, Artificial Sequence
  HTT spacer sequence TTCN PAM
gaaacauuaacagaaguuuu

SEQ ID NO: 33035 - RNA, 20 nt, Artificial Sequence
  HTT spacer sequence TTCN PAM
agauaggaagauuuuauauu

SEQ ID NO: 33036 - RNA, 20 nt, Artificial Sequence
  HTT spacer sequence TTCN PAM
uaucuagaaaguggucaccu

SEQ ID NO: 33037 - RNA, 20 nt, Artificial Sequence
  HTT spacer sequence TTCN PAM
acuuaguaauauaaaaucuu

SEQ ID NO: 33038 - RNA, 20 nt, Artificial Sequence
  HTT spacer sequence TTCN PAM
cuaaauuaacacagaaauuu

SEQ ID NO: 33039 - RNA, 20 nt, Artificial Sequence
  HTT spacer sequence TTCN PAM
guguuaauuuagagaaaauu

SEQ ID NO: 33040 - RNA, 20 nt, Artificial Sequence
  HTT spacer sequence TTCN PAM
aguagagguauuuuugaacu

SEQ ID NO: 33041 - RNA, 20 nt, Artificial Sequence
  HTT spacer sequence TTCN PAM
aaaauaccucuacuagaauu

SEQ ID NO: 33042 - RNA, 20 nt, Artificial Sequence
  HTT spacer sequence TTCN PAM
cugcaagaauaaauacauaa

SEQ ID NO: 33043 - RNA, 20 nt, Artificial Sequence
  HTT spacer sequence TTCN PAM
ugcagugaacaaguucaaaa

SEQ ID NO: 33044 - RNA, 20 nt, Artificial Sequence
  HTT spacer sequence TTCN PAM
uugcaauuauguauuuauuc

SEQ ID NO: 33045 - RNA, 20 nt, Artificial Sequence
  HTT spacer sequence TTCN PAM
ccgcacugguccagcugguc

SEQ ID NO: 33046 - RNA, 20 nt, Artificial Sequence
  HTT spacer sequence TTCN PAM
ccugccucagccucccaagu

SEQ ID NO: 33047 - RNA, 20 nt, Artificial Sequence
  HTT spacer sequence TTCN PAM
agcaauucuccugccucagc

SEQ ID NO: 33048 - RNA, 20 nt, Artificial Sequence
  HTT spacer sequence TTCN PAM
agccugggcgacaagagcaa

SEQ ID NO: 33049 - RNA, 20 nt, Artificial Sequence
  HTT spacer sequence TTCN PAM
gucucaagaaaaaagagaaa

SEQ ID NO: 33050 - RNA, 20 nt, Artificial Sequence
  HTT spacer sequence TTCN PAM
ugagacagaauuuugcucuu

SEQ ID NO: 33051 - RNA, 20 nt, Artificial Sequence
  HTT spacer sequence TTCN PAM
cuuuuuucuugagacagaau

SEQ ID NO: 33052 - RNA, 20 nt, Artificial Sequence
  HTT spacer sequence TTCN PAM
uuuuucucuuuuuucuugag

SEQ ID NO: 33053 - RNA, 20 nt, Artificial Sequence
  HTT spacer sequence TTCN PAM
uuuucuuuuuucucuuuuuu

SEQ ID NO: 33054 - RNA, 20 nt, Artificial Sequence
  HTT spacer sequence TTCN PAM
auaccuguuuuaacauccaa

SEQ ID NO: 33055 - RNA, 20 nt, Artificial Sequence
  HTT spacer sequence TTCN PAM
guucuauaccuguuuuaaca

SEQ ID NO: 33056 - RNA, 20 nt, Artificial Sequence
  HTT spacer sequence TTCN PAM
uucuguucuauaccuguuuu

SEQ ID NO: 33057 - RNA, 20 nt, Artificial Sequence
  HTT spacer sequence TTCN PAM
uacagauacacacauacacu

SEQ ID NO: 33058 - RNA, 20 nt, Artificial Sequence
  HTT spacer sequence TTCN PAM
cuaauacauauauguuacac

SEQ ID NO: 33059 - RNA, 20 nt, Artificial Sequence
  HTT spacer sequence TTCN PAM
cucauuucccuaauacauau

SEQ ID NO: 33060 - RNA, 20 nt, Artificial Sequence
  HTT spacer sequence TTCN PAM
cugacuuugggagaacauua

SEQ ID NO: 33061 - RNA, 20 nt, Artificial Sequence
  HTT spacer sequence TTCN PAM
cccaaagucagagaaaugua

SEQ ID NO: 33062 - RNA, 20 nt, Artificial Sequence
  HTT spacer sequence TTCN PAM
gauuaauuaccuaaauguga

SEQ ID NO: 33063 - RNA, 20 nt, Artificial Sequence
  HTT spacer sequence TTCN PAM
cauuuagguaauuaaucuga

SEQ ID NO: 33064 - RNA, 20 nt, Artificial Sequence
  HTT spacer sequence TTCN PAM
uuuuuucacauuuagguaau

SEQ ID NO: 33065 - RNA, 20 nt, Artificial Sequence
  HTT spacer sequence TTCN PAM
uuaaaaaauguaaucuuagu

SEQ ID NO: 33066 - RNA, 20 nt, Artificial Sequence
  HTT spacer sequence TTCN PAM
ucaaacuaagauuacauuuu

SEQ ID NO: 33067 - RNA, 20 nt, Artificial Sequence
  HTT spacer sequence TTCN PAM
uuuauaauguuaaccuuccu

SEQ ID NO: 33068 - RNA, 20 nt, Artificial Sequence
  HTT spacer sequence TTCN PAM
acucaaaacaguuuuuuccu

SEQ ID NO: 33069 - RNA, 20 nt, Artificial Sequence
  HTT spacer sequence TTCN PAM
auaugucaaaauccaccuuc

SEQ ID NO: 33070 - RNA, 20 nt, Artificial Sequence
  HTT spacer sequence TTCN PAM
acaaaauugaaaguaaauug

SEQ ID NO: 33071 - RNA, 20 nt, Artificial Sequence
  HTT spacer sequence TTCN PAM
auuuuguugaagguggauuu

SEQ ID NO: 33072 - RNA, 20 nt, Artificial Sequence
  HTT spacer sequence TTCN PAM
auuuacuuucaauuuuguug

SEQ ID NO: 33073 - RNA, 20 nt, Artificial Sequence
  HTT spacer sequence TTCN PAM
ccaaguucaauuuacuuuca

SEQ ID NO: 33074 - RNA, 20 nt, Artificial Sequence
  HTT spacer sequence TTCN PAM
uaacgauauuuauaacugcu

SEQ ID NO: 33075 - RNA, 20 nt, Artificial Sequence
  HTT spacer sequence TTCN PAM
ccgacucccagccuccagaa

SEQ ID NO: 33076 - RNA, 20 nt, Artificial Sequence
  HTT spacer sequence TTCN PAM
ggaggcugggagucggagaa

SEQ ID NO: 33077 - RNA, 20 nt, Artificial Sequence
  HTT spacer sequence TTCN PAM
auaacaaaauaccacauaca

SEQ ID NO: 33078 - RNA, 20 nt, Artificial Sequence
  HTT spacer sequence TTCN PAM
gucuacugauuacuaguguc

SEQ ID NO: 33079 - RNA, 20 nt, Artificial Sequence
  HTT spacer sequence TTCN PAM
guuucagucuacugauuacu

SEQ ID NO: 33080 - RNA, 20 nt, Artificial Sequence
  HTT spacer sequence TTCN PAM
uauuuuuguuucaguuucag

SEQ ID NO: 33081 - RNA, 20 nt, Artificial Sequence
  HTT spacer sequence TTCN PAM
uaauguuugccaauuugaca

SEQ ID NO: 33082 - RNA, 20 nt, Artificial Sequence
  HTT spacer sequence TTCN PAM
gauuuuugucagaggugaua

SEQ ID NO: 33083 - RNA, 20 nt, Artificial Sequence
  HTT spacer sequence TTCN PAM
aagaaggcaauuugggaaaa

SEQ ID NO: 33084 - RNA, 20 nt, Artificial Sequence
  HTT spacer sequence TTCN PAM
uagaagguuguaucaccucu

SEQ ID NO: 33085 - RNA, 20 nt, Artificial Sequence
  HTT spacer sequence TTCN PAM
caaauugccuucuuagaagg

SEQ ID NO: 33086 - RNA, 20 nt, Artificial Sequence
  HTT spacer sequence TTCN PAM
uagggguaagcacccuagag

SEQ ID NO: 33087 - RNA, 20 nt, Artificial Sequence
  HTT spacer sequence TTCN PAM
ucccauuagaaaauuaaaaa

SEQ ID NO: 33088 - RNA, 20 nt, Artificial Sequence
  HTT spacer sequence TTCN PAM
aaugggaugaagggcacugc

SEQ ID NO: 33089 - RNA, 20 nt, Artificial Sequence
  HTT spacer sequence TTCN PAM
auccccuuuuagugguaggc

SEQ ID NO: 33090 - RNA, 20 nt, Artificial Sequence
  HTT spacer sequence TTCN PAM
cggguucaugugauucuccu

SEQ ID NO: 33091 - RNA, 20 nt, Artificial Sequence
  HTT spacer sequence TTCN PAM
ugugauucuccugccucagc

SEQ ID NO: 33092 - RNA, 20 nt, Artificial Sequence
  HTT spacer sequence TTCN PAM
ccugccucagccuccugagu

SEQ ID NO: 33093 - RNA, 20 nt, Artificial Sequence
  HTT spacer sequence TTCN PAM
cuguguuggccagacugguc

SEQ ID NO: 33094 - RNA, 20 nt, Artificial Sequence
  HTT spacer sequence TTCN PAM
agaccagucuggccaacaca

SEQ ID NO: 33095 - RNA, 20 nt, Artificial Sequence
  HTT spacer sequence TTCN PAM
cuuguauaaauguaucuggc

SEQ ID NO: 33096 - RNA, 20 nt, Artificial Sequence
  HTT spacer sequence TTCN PAM
uagauauuuauauuuuguuu

SEQ ID NO: 33097 - RNA, 20 nt, Artificial Sequence
  HTT spacer sequence TTCN PAM
ggcugcagugggcuaugauu

SEQ ID NO: 33098 - RNA, 20 nt, Artificial Sequence
  HTT spacer sequence TTCN PAM
gccucagccuuuugaguacc

SEQ ID NO: 33099 - RNA, 20 nt, Artificial Sequence
  HTT spacer sequence TTCN PAM
agaccagccugggcaauaca

SEQ ID NO: 33100 - RNA, 20 nt, Artificial Sequence
  HTT spacer sequence TTCN PAM
ugggcccaagugauccuccc

SEQ ID NO: 33101 - RNA, 20 nt, Artificial Sequence
  HTT spacer sequence TTCN PAM
gaccaauagauauuuauauu

SEQ ID NO: 33102 - RNA, 20 nt, Artificial Sequence
  HTT spacer sequence TTCN PAM
agucacaaauauaaauaucu

SEQ ID NO: 33103 - RNA, 20 nt, Artificial Sequence
  HTT spacer sequence TTCN PAM
guuaaaaaauaaugaaagau

SEQ ID NO: 33104 - RNA, 20 nt, Artificial Sequence
  HTT spacer sequence TTCN PAM
uuauuuuuuaacugaauuuu

SEQ ID NO: 33105 - RNA, 20 nt, Artificial Sequence
  HTT spacer sequence TTCN PAM
ggcuaagauagaauaacaag

SEQ ID NO: 33106 - RNA, 20 nt, Artificial Sequence
  HTT spacer sequence TTCN PAM
aucuuagccagaagcaaaaa

SEQ ID NO: 33107 - RNA, 20 nt, Artificial Sequence
  HTT spacer sequence TTCN PAM
ugccuugaaauaguugaaaa

SEQ ID NO: 33108 - RNA, 20 nt, Artificial Sequence
  HTT spacer sequence TTCN PAM
aggcaagaagauaaaugcug

SEQ ID NO: 33109 - RNA, 20 nt, Artificial Sequence
  HTT spacer sequence TTCN PAM
acuauuucaaggcaagaaga

SEQ ID NO: 33110 - RNA, 20 nt, Artificial Sequence
  HTT spacer sequence TTCN PAM
guuuucaacuauuucaaggc

SEQ ID NO: 33111 - RNA, 20 nt, Artificial Sequence
  HTT spacer sequence TTCN PAM
uccguuuucaacuauuucaa

SEQ ID NO: 33112 - RNA, 20 nt, Artificial Sequence
  HTT spacer sequence TTCN PAM
aguuauugggcaucaggcaa

SEQ ID NO: 33113 - RNA, 20 nt, Artificial Sequence
  HTT spacer sequence TTCN PAM
uugccugaugcccaauaacu

SEQ ID NO: 33114 - RNA, 20 nt, Artificial Sequence
  HTT spacer sequence TTCN PAM
ucuuugccugaugcccaaua

SEQ ID NO: 33115 - RNA, 20 nt, Artificial Sequence
  HTT spacer sequence TTCN PAM
ugggauaacuauucuucuuu

SEQ ID NO: 33116 - RNA, 20 nt, Artificial Sequence
  HTT spacer sequence TTCN PAM
uuuuccugggauaacuauuc

SEQ ID NO: 33117 - RNA, 20 nt, Artificial Sequence
  HTT spacer sequence TTCN PAM
uuacauuacugccuggucau

SEQ ID NO: 33118 - RNA, 20 nt, Artificial Sequence
  HTT spacer sequence TTCN PAM
ucuugccaugaccaggcagu

SEQ ID NO: 33119 - RNA, 20 nt, Artificial Sequence
  HTT spacer sequence TTCN PAM
auaugggcucucaccaccuu

SEQ ID NO: 33120 - RNA, 20 nt, Artificial Sequence
  HTT spacer sequence TTCN PAM
uccauaugggcucucaccac

SEQ ID NO: 33121 - RNA, 20 nt, Artificial Sequence
  HTT spacer sequence TTCN PAM
cugguauucuuccauauggg

SEQ ID NO: 33122 - RNA, 20 nt, Artificial Sequence
  HTT spacer sequence TTCN PAM
gcacaagcaagugcucguca

SEQ ID NO: 33123 - RNA, 20 nt, Artificial Sequence
  HTT spacer sequence TTCN PAM
gguggcucuaccuccagccc

SEQ ID NO: 33124 - RNA, 20 nt, Artificial Sequence
  HTT spacer sequence TTCN PAM
aauccuuucagguggcucua

SEQ ID NO: 33125 - RNA, 20 nt, Artificial Sequence
  HTT spacer sequence TTCN PAM
uucuaauccuuucagguggc

SEQ ID NO: 33126 - RNA, 20 nt, Artificial Sequence
  HTT spacer sequence TTCN PAM
gcaacuguuccuucuaaucc

SEQ ID NO: 33127 - RNA, 20 nt, Artificial Sequence
  HTT spacer sequence TTCN PAM
uggcccugugugacuuucag

SEQ ID NO: 33128 - RNA, 20 nt, Artificial Sequence
  HTT spacer sequence TTCN PAM
uccuggcccugugugacuuu

SEQ ID NO: 33129 - RNA, 20 nt, Artificial Sequence
  HTT spacer sequence TTCN PAM
aaucacaccaguuggagugg

SEQ ID NO: 33130 - RNA, 20 nt, Artificial Sequence
  HTT spacer sequence TTCN PAM
acuccaacuggugugauuag

SEQ ID NO: 33131 - RNA, 20 nt, Artificial Sequence
  HTT spacer sequence TTCN PAM
gaguacccuaccugcucuau

SEQ ID NO: 33132 - RNA, 20 nt, Artificial Sequence
  HTT spacer sequence TTCN PAM
uuacucugacccuaccuaau

SEQ ID NO: 33133 - RNA, 20 nt, Artificial Sequence
  HTT spacer sequence TTCN PAM
caacaaaaauaauauauuuc

SEQ ID NO: 33134 - RNA, 20 nt, Artificial Sequence
  HTT spacer sequence TTCN PAM
guguuuguaacacguagaag

SEQ ID NO: 33135 - RNA, 20 nt, Artificial Sequence
  HTT spacer sequence TTCN PAM
acguguuacaaacacugaaa

SEQ ID NO: 33136 - RNA, 20 nt, Artificial Sequence
  HTT spacer sequence TTCN PAM
cuucuacguguuacaaacac

SEQ ID NO: 33137 - RNA, 20 nt, Artificial Sequence
  HTT spacer sequence TTCN PAM
agccuuuaugcuauugucau

SEQ ID NO: 33138 - RNA, 20 nt, Artificial Sequence
  HTT spacer sequence TTCN PAM
gcucuuccagccuuuaugcu

SEQ ID NO: 33139 - RNA, 20 nt, Artificial Sequence
  HTT spacer sequence TTCN PAM
gcccagcgcaaauacauguc

SEQ ID NO: 33140 - RNA, 20 nt, Artificial Sequence
  HTT spacer sequence TTCN PAM
ccaaaagauaucaaguccua

SEQ ID NO: 33141 - RNA, 20 nt, Artificial Sequence
  HTT spacer sequence TTCN PAM
auauaaaguaauauuuacag

SEQ ID NO: 33142 - RNA, 20 nt, Artificial Sequence
  HTT spacer sequence TTCN PAM
ggaucuugagaugagggggc

SEQ ID NO: 33143 - RNA, 20 nt, Artificial Sequence
  HTT spacer sequence TTCN PAM
cucuguguguaaaaucuccc

SEQ ID NO: 33144 - RNA, 20 nt, Artificial Sequence
  HTT spacer sequence TTCN PAM
cagggccuucucucugugug

SEQ ID NO: 33145 - RNA, 20 nt, Artificial Sequence
  HTT spacer sequence TTCN PAM
aucuucacagggccuucucu

SEQ ID NO: 33146 - RNA, 20 nt, Artificial Sequence
  HTT spacer sequence TTCN PAM
guuccaucuucacagggccu

SEQ ID NO: 33147 - RNA, 20 nt, Artificial Sequence
  HTT spacer sequence TTCN PAM
aaucuuucuguuccaucuuc

SEQ ID NO: 33148 - RNA, 20 nt, Artificial Sequence
  HTT spacer sequence TTCN PAM
aggccagcaccuucaaaucu

SEQ ID NO: 33149 - RNA, 20 nt, Artificial Sequence
  HTT spacer sequence TTCN PAM
ucacuccaauuuucaaggcc

SEQ ID NO: 33150 - RNA, 20 nt, Artificial Sequence
  HTT spacer sequence TTCN PAM
uuggcuuauagcuucaucac

SEQ ID NO: 33151 - RNA, 20 nt, Artificial Sequence
  HTT spacer sequence TTCN PAM
agcuuugguggcugcugcau

SEQ ID NO: 33152 - RNA, 20 nt, Artificial Sequence
  HTT spacer sequence TTCN PAM
cauuuagagccuacuccaga

SEQ ID NO: 33153 - RNA, 20 nt, Artificial Sequence
  HTT spacer sequence TTCN PAM
cucuggaguaggcucuaaau

SEQ ID NO: 33154 - RNA, 20 nt, Artificial Sequence
  HTT spacer sequence TTCN PAM
uuuuuuuuuuuuuuuuuuaa

SEQ ID NO: 33155 - RNA, 20 nt, Artificial Sequence
  HTT spacer sequence TTCN PAM
uggguguuucuuggagaggg

SEQ ID NO: 33156 - RNA, 20 nt, Artificial Sequence
  HTT spacer sequence TTCN PAM
uggagagggggauuuggcag

SEQ ID NO: 33157 - RNA, 20 nt, Artificial Sequence
  HTT spacer sequence TTCN PAM
cuccacuauuguccuaugac

SEQ ID NO: 33158 - RNA, 20 nt, Artificial Sequence
  HTT spacer sequence TTCN PAM
uaggcagagggcccugccac

SEQ ID NO: 33159 - RNA, 20 nt, Artificial Sequence
  HTT spacer sequence TTCN PAM
gcaguguuugugucccuggg

SEQ ID NO: 33160 - RNA, 20 nt, Artificial Sequence
  HTT spacer sequence TTCN PAM
agcaucuguuuaacaaagca

SEQ ID NO: 33161 - RNA, 20 nt, Artificial Sequence
  HTT spacer sequence TTCN PAM
gagagcacgggguugggggu

SEQ ID NO: 33162 - RNA, 20 nt, Artificial Sequence
  HTT spacer sequence TTCN PAM
gccuugggaugcuguuaauc

SEQ ID NO: 33163 - RNA, 20 nt, Artificial Sequence
  HTT spacer sequence TTCN PAM
ucugccuugggaugcuguua

SEQ ID NO: 33164 - RNA, 20 nt, Artificial Sequence
  HTT spacer sequence TTCN PAM
uaguacagaacaaaauggag

SEQ ID NO: 33165 - RNA, 20 nt, Artificial Sequence
  HTT spacer sequence TTCN PAM
guacuaagaaaaauucuucu

SEQ ID NO: 33166 - RNA, 20 nt, Artificial Sequence
  HTT spacer sequence TTCN PAM
uucuacgcagacacaguaac

SEQ ID NO: 33167 - RNA, 20 nt, Artificial Sequence
  HTT spacer sequence TTCN PAM
acgcagacacaguaacaauc

SEQ ID NO: 33168 - RNA, 20 nt, Artificial Sequence
  HTT spacer sequence TTCN PAM
uuucccacauuuccuccuuu

SEQ ID NO: 33169 - RNA, 20 nt, Artificial Sequence
  HTT spacer sequence TTCN PAM
cacauuuccuccuuuucuau

SEQ ID NO: 33170 - RNA, 20 nt, Artificial Sequence
  HTT spacer sequence TTCN PAM
uccuuuucuauucgacaaaa

SEQ ID NO: 33171 - RNA, 20 nt, Artificial Sequence
  HTT spacer sequence TTCN PAM
auucgacaaaacugccaccg

SEQ ID NO: 33172 - RNA, 20 nt, Artificial Sequence
  HTT spacer sequence TTCN PAM
acaaaacugccaccgucauc

SEQ ID NO: 33173 - RNA, 20 nt, Artificial Sequence
  HTT spacer sequence TTCN PAM
caaugagcuauuggguacac

SEQ ID NO: 33174 - RNA, 20 nt, Artificial Sequence
  HTT spacer sequence TTCN PAM
cagauggggcggccgggcag

SEQ ID NO: 33175 - RNA, 20 nt, Artificial Sequence
  HTT spacer sequence TTCN PAM
cggacggggcggcugcuggg

SEQ ID NO: 33176 - RNA, 20 nt, Artificial Sequence
  HTT spacer sequence TTCN PAM
cagacggggcggcuggucag

SEQ ID NO: 33177 - RNA, 20 nt, Artificial Sequence
  HTT spacer sequence TTCN PAM
uaaguucccagacggaguca

SEQ ID NO: 33178 - RNA, 20 nt, Artificial Sequence
  HTT spacer sequence TTCN PAM
cagacggagucacggccggg

SEQ ID NO: 33179 - RNA, 20 nt, Artificial Sequence
  HTT spacer sequence TTCN PAM
caucucagacggggcggcgg

SEQ ID NO: 33180 - RNA, 20 nt, Artificial Sequence
  HTT spacer sequence TTCN PAM
cagacgaugggcggccgggc

SEQ ID NO: 33181 - RNA, 20 nt, Artificial Sequence
  HTT spacer sequence TTCN PAM
uagaugggaugacagccggg

SEQ ID NO: 33182 - RNA, 20 nt, Artificial Sequence
  HTT spacer sequence TTCN PAM
cggcugucaucccaucuagg

SEQ ID NO: 33183 - RNA, 20 nt, Artificial Sequence
  HTT spacer sequence TTCN PAM
cagacugggcagccaggcag

SEQ ID NO: 33184 - RNA, 20 nt, Artificial Sequence
  HTT spacer sequence TTCN PAM
gccuggccgcccaucgucug

SEQ ID NO: 33185 - RNA, 20 nt, Artificial Sequence
  HTT spacer sequence TTCN PAM
uagacgggguggcggcuggg

SEQ ID NO: 33186 - RNA, 20 nt, Artificial Sequence
  HTT spacer sequence TTCN PAM
ccucccagccgccugccuug

SEQ ID NO: 33187 - RNA, 20 nt, Artificial Sequence
  HTT spacer sequence TTCN PAM
ccguguuggccgggcugguc

SEQ ID NO: 33188 - RNA, 20 nt, Artificial Sequence
  HTT spacer sequence TTCN PAM
uguuuuuugguggagacggg

SEQ ID NO: 33189 - RNA, 20 nt, Artificial Sequence
  HTT spacer sequence TTCN PAM
ccugccucagccugccaagu

SEQ ID NO: 33190 - RNA, 20 nt, Artificial Sequence
  HTT spacer sequence TTCN PAM
cucgcccucgcccucgcccu

SEQ ID NO: 33191 - RNA, 20 nt, Artificial Sequence
  HTT spacer sequence TTCN PAM
uuaauuucaguuuagugaua

SEQ ID NO: 33192 - RNA, 20 nt, Artificial Sequence
  HTT spacer sequence TTCN PAM
guuuagugauacuaauuuug

SEQ ID NO: 33193 - RNA, 20 nt, Artificial Sequence
  HTT spacer sequence TTCN PAM
caguuuuagaggccagaguc

SEQ ID NO: 33194 - RNA, 20 nt, Artificial Sequence
  HTT spacer sequence TTCN PAM
uucacaguuuuagaggccag

SEQ ID NO: 33195 - RNA, 20 nt, Artificial Sequence
  HTT spacer sequence TTCN PAM
uuuaagccacauaguuugug

SEQ ID NO: 33196 - RNA, 20 nt, Artificial Sequence
  HTT spacer sequence TTCN PAM
ugcagcugcuguaacaaauu

SEQ ID NO: 33197 - RNA, 20 nt, Artificial Sequence
  HTT spacer sequence TTCN PAM
caugcagcauaaauuaguuu

SEQ ID NO: 33198 - RNA, 20 nt, Artificial Sequence
  HTT spacer sequence TTCN PAM
ucacaaucuaccuuauuaca

SEQ ID NO: 33199 - RNA, 20 nt, Artificial Sequence
  HTT spacer sequence TTCN PAM
uuguugugcuuuuaguuguu

SEQ ID NO: 33200 - RNA, 20 nt, Artificial Sequence
  HTT spacer sequence TTCN PAM
uuagcuauaauuccuuguug

SEQ ID NO: 33201 - RNA, 20 nt, Artificial Sequence
  HTT spacer sequence TTCN PAM
aaucuccuuuuuugguucau

SEQ ID NO: 33202 - RNA, 20 nt, Artificial Sequence
  HTT spacer sequence TTCN PAM
ccauuuuuauuauucuaauc

SEQ ID NO: 33203 - RNA, 20 nt, Artificial Sequence
  HTT spacer sequence TTCN PAM
uugggauucaccauuuuuau

SEQ ID NO: 33204 - RNA, 20 nt, Artificial Sequence
  HTT spacer sequence TTCN PAM
ggcuucuuugggauucacca

SEQ ID NO: 33205 - RNA, 20 nt, Artificial Sequence
  HTT spacer sequence TTCN PAM
ccuauuucuggcuucuuugg

SEQ ID NO: 33206 - RNA, 20 nt, Artificial Sequence
  HTT spacer sequence TTCN PAM
uuuauuugccucuuccccua

SEQ ID NO: 33207 - RNA, 20 nt, Artificial Sequence
  HTT spacer sequence TTCN PAM
uuccuuuauuugccucuucc

SEQ ID NO: 33208 - RNA, 20 nt, Artificial Sequence
  HTT spacer sequence TTCN PAM
accuaacuaugucaaaaagg

SEQ ID NO: 33209 - RNA, 20 nt, Artificial Sequence
  HTT spacer sequence TTCN PAM
gauugaauggaaaaguaaga

SEQ ID NO: 33210 - RNA, 20 nt, Artificial Sequence
  HTT spacer sequence TTCN PAM
aucugaaaaaucgcugccuu

SEQ ID NO: 33211 - RNA, 20 nt, Artificial Sequence
  HTT spacer sequence TTCN PAM
auucaaucugaaaaaucgcu

SEQ ID NO: 33212 - RNA, 20 nt, Artificial Sequence
  HTT spacer sequence TTCN PAM
ugcaggcagcagcauauacc

SEQ ID NO: 33213 - RNA, 20 nt, Artificial Sequence
  HTT spacer sequence TTCN PAM
aaauauaaaggcaaaaauaa

SEQ ID NO: 33214 - RNA, 20 nt, Artificial Sequence
  HTT spacer sequence TTCN PAM
guuaccuguagguuauuuuu

SEQ ID NO: 33215 - RNA, 20 nt, Artificial Sequence
  HTT spacer sequence TTCN PAM
guucuguuaccuguagguua

SEQ ID NO: 33216 - RNA, 20 nt, Artificial Sequence
  HTT spacer sequence TTCN PAM
uuccguucuguuaccuguag

SEQ ID NO: 33217 - RNA, 20 nt, Artificial Sequence
  HTT spacer sequence TTCN PAM
cugugcuuacaagaauuaga

SEQ ID NO: 33218 - RNA, 20 nt, Artificial Sequence
  HTT spacer sequence TTCN PAM
uguaagcacagugaacuucu

SEQ ID NO: 33219 - RNA, 20 nt, Artificial Sequence
  HTT spacer sequence TTCN PAM
guuaauaucagacaaagugg

SEQ ID NO: 33220 - RNA, 20 nt, Artificial Sequence
  HTT spacer sequence TTCN PAM
aagcaaaggcucuugcccag

SEQ ID NO: 33221 - RNA, 20 nt, Artificial Sequence
  HTT spacer sequence TTCN PAM
uaaugaugaaggggauucgu

SEQ ID NO: 33222 - RNA, 20 nt, Artificial Sequence
  HTT spacer sequence TTCN PAM
ucauuaugaaaugaccaucu

SEQ ID NO: 33223 - RNA, 20 nt, Artificial Sequence
  HTT spacer sequence TTCN PAM
uucaucagccuggcauagca

SEQ ID NO: 33224 - RNA, 20 nt, Artificial Sequence
  HTT spacer sequence TTCN PAM
ucagccuggcauagcaagcu

SEQ ID NO: 33225 - RNA, 20 nt, Artificial Sequence
  HTT spacer sequence TTCN PAM
gcuugcuaugccaggcugau

SEQ ID NO: 33226 - RNA, 20 nt, Artificial Sequence
  HTT spacer sequence TTCN PAM
uguauuuuagcucuguaguc

SEQ ID NO: 33227 - RNA, 20 nt, Artificial Sequence
  HTT spacer sequence TTCN PAM
gucaggcuuugcuucaugua

SEQ ID NO: 33228 - RNA, 20 nt, Artificial Sequence
  HTT spacer sequence TTCN PAM
acuuguaguucugucaggcu

SEQ ID NO: 33229 - RNA, 20 nt, Artificial Sequence
  HTT spacer sequence TTCN PAM
guagccgcucucaaugauuu

SEQ ID NO: 33230 - RNA, 20 nt, Artificial Sequence
  HTT spacer sequence TTCN PAM
acaaaucauugagagcggcu

SEQ ID NO: 33231 - RNA, 20 nt, Artificial Sequence
  HTT spacer sequence TTCN PAM
agauccagauauuauggcua

SEQ ID NO: 33232 - RNA, 20 nt, Artificial Sequence
  HTT spacer sequence TTCN PAM
gcuggugcuggguggagugu

SEQ ID NO: 33233 - RNA, 20 nt, Artificial Sequence
  HTT spacer sequence TTCN PAM
gugagcacuugagagagugu

SEQ ID NO: 33234 - RNA, 20 nt, Artificial Sequence
  HTT spacer sequence TTCN PAM
aauuauucagaguauguuuu

SEQ ID NO: 33235 - RNA, 20 nt, Artificial Sequence
  HTT spacer sequence TTCN PAM
gaguauguuuucugaccuca

SEQ ID NO: 33236 - RNA, 20 nt, Artificial Sequence
  HTT spacer sequence TTCN PAM
gaccucaguaucauuaaguu

SEQ ID NO: 33237 - RNA, 20 nt, Artificial Sequence
  HTT spacer sequence TTCN PAM
aacuuaaugauacugagguc

SEQ ID NO: 33238 - RNA, 20 nt, Artificial Sequence
  HTT spacer sequence TTCN PAM
uauaauauauuccaacuuaa

SEQ ID NO: 33239 - RNA, 20 nt, Artificial Sequence
  HTT spacer sequence TTCN PAM
agguuaucuuccuauaauau

SEQ ID NO: 33240 - RNA, 20 nt, Artificial Sequence
  HTT spacer sequence TTCN PAM
acauaucugaggcuuuucca

SEQ ID NO: 33241 - RNA, 20 nt, Artificial Sequence
  HTT spacer sequence TTCN PAM
acauggcccaugggucagaa

SEQ ID NO: 33242 - RNA, 20 nt, Artificial Sequence
  HTT spacer sequence TTCN PAM
gacccaugggccauguggaa

SEQ ID NO: 33243 - RNA, 20 nt, Artificial Sequence
  HTT spacer sequence TTCN PAM
cuucugacccaugggccaug

SEQ ID NO: 33244 - RNA, 20 nt, Artificial Sequence
  HTT spacer sequence TTCN PAM
cuuuugacuucacuucugac

SEQ ID NO: 33245 - RNA, 20 nt, Artificial Sequence
  HTT spacer sequence TTCN PAM
aauuucccuuuugacuucac

SEQ ID NO: 33246 - RNA, 20 nt, Artificial Sequence
  HTT spacer sequence TTCN PAM
aaacuuguggggugcuguua

SEQ ID NO: 33247 - RNA, 20 nt, Artificial Sequence
  HTT spacer sequence TTCN PAM
auuuacuaugcuguaacagc

SEQ ID NO: 33248 - RNA, 20 nt, Artificial Sequence
  HTT spacer sequence TTCN PAM
agcauuaaaugccuguuuua

SEQ ID NO: 33249 - RNA, 20 nt, Artificial Sequence
  HTT spacer sequence TTCN PAM
uaaaacaggcauuuaaugcu

SEQ ID NO: 33250 - RNA, 20 nt, Artificial Sequence
  HTT spacer sequence TTCN PAM
uuccuaaaacaggcauuuaa

SEQ ID NO: 33251 - RNA, 20 nt, Artificial Sequence
  HTT spacer sequence TTCN PAM
aaucaaugaccucagcuucu

SEQ ID NO: 33252 - RNA, 20 nt, Artificial Sequence
  HTT spacer sequence TTCN PAM
accuuuggaaacuugaaaau

SEQ ID NO: 33253 - RNA, 20 nt, Artificial Sequence
  HTT spacer sequence TTCN PAM
aaagguagaagcugagguca

SEQ ID NO: 33254 - RNA, 20 nt, Artificial Sequence
  HTT spacer sequence TTCN PAM
aguuuccaaagguagaagcu

SEQ ID NO: 33255 - RNA, 20 nt, Artificial Sequence
  HTT spacer sequence TTCN PAM
auuugcuugucauuuucaag

SEQ ID NO: 33256 - RNA, 20 nt, Artificial Sequence
  HTT spacer sequence TTCN PAM
gguaacucuggauuccauuu

SEQ ID NO: 33257 - RNA, 20 nt, Artificial Sequence
  HTT spacer sequence TTCN PAM
gccacuuugggaggccgagg

SEQ ID NO: 33258 - RNA, 20 nt, Artificial Sequence
  HTT spacer sequence TTCN PAM
acugccagucucaaacaauc

SEQ ID NO: 33259 - RNA, 20 nt, Artificial Sequence
  HTT spacer sequence TTCN PAM
cugcagccucaaccucccag

SEQ ID NO: 33260 - RNA, 20 nt, Artificial Sequence
  HTT spacer sequence TTCN PAM
auccugggcaacagaaugag

SEQ ID NO: 33261 - RNA, 20 nt, Artificial Sequence
  HTT spacer sequence TTCN PAM
guugcccaggauggaacaca

SEQ ID NO: 33262 - RNA, 20 nt, Artificial Sequence
  HTT spacer sequence TTCN PAM
aguaacuguuuuuguuuuug

SEQ ID NO: 33263 - RNA, 20 nt, Artificial Sequence
  HTT spacer sequence TTCN PAM
ucuaguaacuguuuuuguuu

SEQ ID NO: 33264 - RNA, 20 nt, Artificial Sequence
  HTT spacer sequence TTCN PAM
gcuccuaucuuuaugauguc

SEQ ID NO: 33265 - RNA, 20 nt, Artificial Sequence
  HTT spacer sequence TTCN PAM
auuuuacugacuucugcucc

SEQ ID NO: 33266 - RNA, 20 nt, Artificial Sequence
  HTT spacer sequence TTCN PAM
uauguauuuuuguuuucuau

SEQ ID NO: 33267 - RNA, 20 nt, Artificial Sequence
  HTT spacer sequence TTCN PAM
ucaagaacaucaauaaauug

SEQ ID NO: 33268 - RNA, 20 nt, Artificial Sequence
  HTT spacer sequence TTCN PAM
ugaugaaccagcuuuugguu

SEQ ID NO: 33269 - RNA, 20 nt, Artificial Sequence
  HTT spacer sequence TTCN PAM
uaucagcuuuaccaauuuau

SEQ ID NO: 33270 - RNA, 20 nt, Artificial Sequence
  HTT spacer sequence TTCN PAM
cuguuuuuccuaucagcuuu

SEQ ID NO: 33271 - RNA, 20 nt, Artificial Sequence
  HTT spacer sequence TTCN PAM
ugauauugcuaauuugugac

SEQ ID NO: 33272 - RNA, 20 nt, Artificial Sequence
  HTT spacer sequence TTCN PAM
cgccuguaaucccagcaccu

SEQ ID NO: 33273 - RNA, 20 nt, Artificial Sequence
  HTT spacer sequence TTCN PAM
ccauguuggccaggcugguc

SEQ ID NO: 33274 - RNA, 20 nt, Artificial Sequence
  HTT spacer sequence TTCN PAM
ccugccucagccucccaagu

SEQ ID NO: 33275 - RNA, 20 nt, Artificial Sequence
  HTT spacer sequence TTCN PAM
agcaauucuccugccucagc

SEQ ID NO: 33276 - RNA, 20 nt, Artificial Sequence
  HTT spacer sequence TTCN PAM
uaauauuaccauauaguccu

SEQ ID NO: 33277 - RNA, 20 nt, Artificial Sequence
  HTT spacer sequence TTCN PAM
ucuauaaguugucaaauuua

SEQ ID NO: 33278 - RNA, 20 nt, Artificial Sequence
  HTT spacer sequence TTCN PAM
uugaaagacacagaaacuau

SEQ ID NO: 33279 - RNA, 20 nt, Artificial Sequence
  HTT spacer sequence TTCN PAM
aggaacucauccauuucauc

SEQ ID NO: 33280 - RNA, 20 nt, Artificial Sequence
  HTT spacer sequence TTCN PAM
gugucuuucaaggaacucau

SEQ ID NO: 33281 - RNA, 20 nt, Artificial Sequence
  HTT spacer sequence TTCN PAM
ugagagagcuuuaauaguuu

SEQ ID NO: 33282 - RNA, 20 nt, Artificial Sequence
  HTT spacer sequence TTCN PAM
auaaaauagauauagggcua

SEQ ID NO: 33283 - RNA, 20 nt, Artificial Sequence
  HTT spacer sequence TTCN PAM
aguaacuaaauauugauuuu

SEQ ID NO: 33284 - RNA, 20 nt, Artificial Sequence
  HTT spacer sequence TTCN PAM
aaccacacuuaaaaguuuuc

SEQ ID NO: 33285 - RNA, 20 nt, Artificial Sequence
  HTT spacer sequence TTCN PAM
uauaccauuuccaaccacac

SEQ ID NO: 33286 - RNA, 20 nt, Artificial Sequence
  HTT spacer sequence TTCN PAM
acugaauuuuaugaagucua

SEQ ID NO: 33287 - RNA, 20 nt, Artificial Sequence
  HTT spacer sequence TTCN PAM
guugaaaaaguucguauacc

SEQ ID NO: 33288 - RNA, 20 nt, Artificial Sequence
  HTT spacer sequence TTCN PAM
uaaaauucaguugaaaaagu

SEQ ID NO: 33289 - RNA, 20 nt, Artificial Sequence
  HTT spacer sequence TTCN PAM
gaugaaaauuuagugucuga

SEQ ID NO: 33290 - RNA, 20 nt, Artificial Sequence
  HTT spacer sequence TTCN PAM
ucagaaaaccuuuaccugug

SEQ ID NO: 33291 - RNA, 20 nt, Artificial Sequence
  HTT spacer sequence TTCN PAM
gacacuaaauuuucaucaga

SEQ ID NO: 33292 - RNA, 20 nt, Artificial Sequence
  HTT spacer sequence TTCN PAM
ucacauuaauuacauguuga

SEQ ID NO: 33293 - RNA, 20 nt, Artificial Sequence
  HTT spacer sequence TTCN PAM
cauuaauuacauguugaaau

SEQ ID NO: 33294 - RNA, 20 nt, Artificial Sequence
  HTT spacer sequence TTCN PAM
acauguaauuaaugugaaga

SEQ ID NO: 33295 - RNA, 20 nt, Artificial Sequence
  HTT spacer sequence TTCN PAM
uaauauuuaauuuaacccaa

SEQ ID NO: 33296 - RNA, 20 nt, Artificial Sequence
  HTT spacer sequence TTCN PAM
uuuuacuuuugaugcgucag

SEQ ID NO: 33297 - RNA, 20 nt, Artificial Sequence
  HTT spacer sequence TTCN PAM
uagcugacgcaucaaaagua

SEQ ID NO: 33298 - RNA, 20 nt, Artificial Sequence
  HTT spacer sequence TTCN PAM
guuucuguugacaguacugc

SEQ ID NO: 33299 - RNA, 20 nt, Artificial Sequence
  HTT spacer sequence TTCN PAM
guugacaguacugcuuugga

SEQ ID NO: 33300 - RNA, 20 nt, Artificial Sequence
  HTT spacer sequence TTCN PAM
aacacugugcuccaaagcag

SEQ ID NO: 33301 - RNA, 20 nt, Artificial Sequence
  HTT spacer sequence TTCN PAM
aagaccuuuccucaguucgu

SEQ ID NO: 33302 - RNA, 20 nt, Artificial Sequence
  HTT spacer sequence TTCN PAM
ucaguucguuauucauggcu

SEQ ID NO: 33303 - RNA, 20 nt, Artificial Sequence
  HTT spacer sequence TTCN PAM
uuauucauggcugucuguau

SEQ ID NO: 33304 - RNA, 20 nt, Artificial Sequence
  HTT spacer sequence TTCN PAM
uggcugucuguauuccacau

SEQ ID NO: 33305 - RNA, 20 nt, Artificial Sequence
  HTT spacer sequence TTCN PAM
acauagauaaggucugaaau

SEQ ID NO: 33306 - RNA, 20 nt, Artificial Sequence
  HTT spacer sequence TTCN PAM
gaccuuaucuauguggaaua

SEQ ID NO: 33307 - RNA, 20 nt, Artificial Sequence
  HTT spacer sequence TTCN PAM
aaccauuguuugcaauuuuu

SEQ ID NO: 33308 - RNA, 20 nt, Artificial Sequence
  HTT spacer sequence TTCN PAM
cuuuaucucuagguaaaaau

SEQ ID NO: 33309 - RNA, 20 nt, Artificial Sequence
  HTT spacer sequence TTCN PAM
gaguaguuagauugggauca

SEQ ID NO: 33310 - RNA, 20 nt, Artificial Sequence
  HTT spacer sequence TTCN PAM
ugaucccaaucuaacuacuc

SEQ ID NO: 33311 - RNA, 20 nt, Artificial Sequence
  HTT spacer sequence TTCN PAM
aaaauagcacaucccccgua

SEQ ID NO: 33312 - RNA, 20 nt, Artificial Sequence
  HTT spacer sequence TTCN PAM
ugggauuacuucaagaacau

SEQ ID NO: 33313 - RNA, 20 nt, Artificial Sequence
  HTT spacer sequence TTCN PAM
agaacauccuuguguuacug

SEQ ID NO: 33314 - RNA, 20 nt, Artificial Sequence
  HTT spacer sequence TTCN PAM
ugaaguaaucccaagaauag

SEQ ID NO: 33315 - RNA, 20 nt, Artificial Sequence
  HTT spacer sequence TTCN PAM
gaaugcugugaagucaguuu

SEQ ID NO: 33316 - RNA, 20 nt, Artificial Sequence
  HTT spacer sequence TTCN PAM
gaagcauccaaaccaguaac

SEQ ID NO: 33317 - RNA, 20 nt, Artificial Sequence
  HTT spacer sequence TTCN PAM
cagcauucagaagcauccaa

SEQ ID NO: 33318 - RNA, 20 nt, Artificial Sequence
  HTT spacer sequence TTCN PAM
uguacauggcucaucaguuu

SEQ ID NO: 33319 - RNA, 20 nt, Artificial Sequence
  HTT spacer sequence TTCN PAM
uucaauuaaacauuuuaaaa

SEQ ID NO: 33320 - RNA, 20 nt, Artificial Sequence
  HTT spacer sequence TTCN PAM
auuaaacauuuuaaaauagu

SEQ ID NO: 33321 - RNA, 20 nt, Artificial Sequence
  HTT spacer sequence TTCN PAM
cccuaagaugccagaugauc

SEQ ID NO: 33322 - RNA, 20 nt, Artificial Sequence
  HTT spacer sequence TTCN PAM
guaugggccaaaguauaacc

SEQ ID NO: 33323 - RNA, 20 nt, Artificial Sequence
  HTT spacer sequence TTCN PAM
gcagucuaucucuccugccc

SEQ ID NO: 33324 - RNA, 20 nt, Artificial Sequence
  HTT spacer sequence TTCN PAM
agguuccaagaauauuguag

SEQ ID NO: 33325 - RNA, 20 nt, Artificial Sequence
  HTT spacer sequence TTCN PAM
aagaauauuguagguuaaga

SEQ ID NO: 33326 - RNA, 20 nt, Artificial Sequence
  HTT spacer sequence TTCN PAM
uggaaccuugaaaaucaguu

SEQ ID NO: 33327 - RNA, 20 nt, Artificial Sequence
  HTT spacer sequence TTCN PAM
accaaaaguuuacuuuuacu

SEQ ID NO: 33328 - RNA, 20 nt, Artificial Sequence
  HTT spacer sequence TTCN PAM
auccuagacaacccacugcu

SEQ ID NO: 33329 - RNA, 20 nt, Artificial Sequence
  HTT spacer sequence TTCN PAM
gauacuucaauccuagacaa

SEQ ID NO: 33330 - RNA, 20 nt, Artificial Sequence
  HTT spacer sequence TTCN PAM
uuuaaaaacuucagauacuu

SEQ ID NO: 33331 - RNA, 20 nt, Artificial Sequence
  HTT spacer sequence TTCN PAM
uuuuaaauuuucguuuaaaa

SEQ ID NO: 33332 - RNA, 20 nt, Artificial Sequence
  HTT spacer sequence TTCN PAM
cauuuuucuuuuuaaauuuu

SEQ ID NO: 33333 - RNA, 20 nt, Artificial Sequence
  HTT spacer sequence TTCN PAM
uuuuuaaaaaauaaacuuua

SEQ ID NO: 33334 - RNA, 20 nt, Artificial Sequence
  HTT spacer sequence TTCN PAM
aaauaaaguuuauuuuuuaa

SEQ ID NO: 33335 - RNA, 20 nt, Artificial Sequence
  HTT spacer sequence TTCN PAM
auaaaucuaaaacuauuuca

SEQ ID NO: 33336 - RNA, 20 nt, Artificial Sequence
  HTT spacer sequence TTCN PAM
uacccuaucuaauuuuuuuc

SEQ ID NO: 33337 - RNA, 20 nt, Artificial Sequence
  HTT spacer sequence TTCN PAM
uauacccuacauccaguuac

SEQ ID NO: 33338 - RNA, 20 nt, Artificial Sequence
  HTT spacer sequence TTCN PAM
uguuuaaugaaucaauauug

SEQ ID NO: 33339 - RNA, 20 nt, Artificial Sequence
  HTT spacer sequence TTCN PAM
uuaaacaugaaaaugucuca

SEQ ID NO: 33340 - RNA, 20 nt, Artificial Sequence
  HTT spacer sequence TTCN PAM
gauuuucuuaauuucuaugu

SEQ ID NO: 33341 - RNA, 20 nt, Artificial Sequence
  HTT spacer sequence TTCN PAM
uaauuucuauguaauguccu

SEQ ID NO: 33342 - RNA, 20 nt, Artificial Sequence
  HTT spacer sequence TTCN PAM
auguaauguccuuuuucugu

SEQ ID NO: 33343 - RNA, 20 nt, Artificial Sequence
  HTT spacer sequence TTCN PAM
guuccagaauuccaugcagg

SEQ ID NO: 33344 - RNA, 20 nt, Artificial Sequence
  HTT spacer sequence TTCN PAM
agaauuccaugcaggacacc

SEQ ID NO: 33345 - RNA, 20 nt, Artificial Sequence
  HTT spacer sequence TTCN PAM
ggaacagaaaaaggacauua

SEQ ID NO: 33346 - RNA, 20 nt, Artificial Sequence
  HTT spacer sequence TTCN PAM
augcaggacaccggauaccu

SEQ ID NO: 33347 - RNA, 20 nt, Artificial Sequence
  HTT spacer sequence TTCN PAM
uugucaugucaccuuaggcu

SEQ ID NO: 33348 - RNA, 20 nt, Artificial Sequence
  HTT spacer sequence TTCN PAM
cuucuuuuuuugcuuagaaa

SEQ ID NO: 33349 - RNA, 20 nt, Artificial Sequence
  HTT spacer sequence TTCN PAM
uuuuuugcuuagaaauucuc

SEQ ID NO: 33350 - RNA, 20 nt, Artificial Sequence
  HTT spacer sequence TTCN PAM
aagcaaaaaaagaagagaaa

SEQ ID NO: 33351 - RNA, 20 nt, Artificial Sequence
  HTT spacer sequence TTCN PAM
ccagaauuucagaaacuucu

SEQ ID NO: 33352 - RNA, 20 nt, Artificial Sequence
  HTT spacer sequence TTCN PAM
ggagaauuucuaagcaaaaa

SEQ ID NO: 33353 - RNA, 20 nt, Artificial Sequence
  HTT spacer sequence TTCN PAM
gaaacuucugggcaucgcua

SEQ ID NO: 33354 - RNA, 20 nt, Artificial Sequence
  HTT spacer sequence TTCN PAM
gaaauucuggagaauuucua

SEQ ID NO: 33355 - RNA, 20 nt, Artificial Sequence
  HTT spacer sequence TTCN PAM
gggcaucgcuauggaacuuu

SEQ ID NO: 33356 - RNA, 20 nt, Artificial Sequence
  HTT spacer sequence TTCN PAM
auagcgaugcccagaaguuu

SEQ ID NO: 33357 - RNA, 20 nt, Artificial Sequence
  HTT spacer sequence TTCN PAM
gcugugcagugaugacgcag

SEQ ID NO: 33358 - RNA, 20 nt, Artificial Sequence
  HTT spacer sequence TTCN PAM
ucagccaccauccugacauc

SEQ ID NO: 33359 - RNA, 20 nt, Artificial Sequence
  HTT spacer sequence TTCN PAM
uacuuugauaacuuuguuga

SEQ ID NO: 33360 - RNA, 20 nt, Artificial Sequence
  HTT spacer sequence TTCN PAM
ccucagagcuaucauuguug

SEQ ID NO: 33361 - RNA, 20 nt, Artificial Sequence
  HTT spacer sequence TTCN PAM
cucagccuacaacaaugaua

SEQ ID NO: 33362 - RNA, 20 nt, Artificial Sequence
  HTT spacer sequence TTCN PAM
ucucucagccuacaacaaug

SEQ ID NO: 33363 - RNA, 20 nt, Artificial Sequence
  HTT spacer sequence TTCN PAM
ucuguuuugagucccugagg

SEQ ID NO: 33364 - RNA, 20 nt, Artificial Sequence
  HTT spacer sequence TTCN PAM
guuuugagucccugaggaug

SEQ ID NO: 33365 - RNA, 20 nt, Artificial Sequence
  HTT spacer sequence TTCN PAM
uuucugauguaugguuugga

SEQ ID NO: 33366 - RNA, 20 nt, Artificial Sequence
  HTT spacer sequence TTCN PAM
gauguaugguuuggaggugc

SEQ ID NO: 33367 - RNA, 20 nt, Artificial Sequence
  HTT spacer sequence TTCN PAM
aaaccauacaauagagcacc

SEQ ID NO: 33368 - RNA, 20 nt, Artificial Sequence
  HTT spacer sequence TTCN PAM
aaaccauacaauagagcacc

SEQ ID NO: 33369 - RNA, 20 nt, Artificial Sequence
  HTT spacer sequence TTCN PAM
gaccgggcagguguggcaag

SEQ ID NO: 33370 - RNA, 20 nt, Artificial Sequence
  HTT spacer sequence TTCN PAM
uugaccuaggcaccgugcag

SEQ ID NO: 33371 - RNA, 20 nt, Artificial Sequence
  HTT spacer sequence TTCN PAM
cuucauugaccuaggcaccg

SEQ ID NO: 33372 - RNA, 20 nt, Artificial Sequence
  HTT spacer sequence TTCN PAM
caggagcauccaguggcuac

SEQ ID NO: 33373 - RNA, 20 nt, Artificial Sequence
  HTT spacer sequence TTCN PAM
cuggugccuguagugacauu

SEQ ID NO: 33374 - RNA, 20 nt, Artificial Sequence
  HTT spacer sequence TTCN PAM
augagucucaguuuucuuaa

SEQ ID NO: 33375 - RNA, 20 nt, Artificial Sequence
  HTT spacer sequence TTCN PAM
uaaccauaaaaugggaucaa

SEQ ID NO: 33376 - RNA, 20 nt, Artificial Sequence
  HTT spacer sequence TTCN PAM
uaccacuuugaggauccagu

SEQ ID NO: 33377 - RNA, 20 nt, Artificial Sequence
  HTT spacer sequence TTCN PAM
uauuaauaaugacauccuua

SEQ ID NO: 33378 - RNA, 20 nt, Artificial Sequence
  HTT spacer sequence TTCN PAM
cuuuuuccaucacaugguuu

SEQ ID NO: 33379 - RNA, 20 nt, Artificial Sequence
  HTT spacer sequence TTCN PAM
aucacaugguuuccauggua

SEQ ID NO: 33380 - RNA, 20 nt, Artificial Sequence
  HTT spacer sequence TTCN PAM
augguauccuuuugcccagg

SEQ ID NO: 33381 - RNA, 20 nt, Artificial Sequence
  HTT spacer sequence TTCN PAM
cugggcaaaaggauaccaug

SEQ ID NO: 33382 - RNA, 20 nt, Artificial Sequence
  HTT spacer sequence TTCN PAM
guggucaggacgcuggcuuc

SEQ ID NO: 33383 - RNA, 20 nt, Artificial Sequence
  HTT spacer sequence TTCN PAM
cuggagccaugggauucuag

SEQ ID NO: 33384 - RNA, 20 nt, Artificial Sequence
  HTT spacer sequence TTCN PAM
agcucccugucuugucccua

SEQ ID NO: 33385 - RNA, 20 nt, Artificial Sequence
  HTT spacer sequence TTCN PAM
cucuccgcuugcaauuccug

SEQ ID NO: 33386 - RNA, 20 nt, Artificial Sequence
  HTT spacer sequence TTCN PAM
ugcuuugcucgcaucucacu

SEQ ID NO: 33387 - RNA, 20 nt, Artificial Sequence
  HTT spacer sequence TTCN PAM
ccuuguucuccgugccugcu

SEQ ID NO: 33388 - RNA, 20 nt, Artificial Sequence
  HTT spacer sequence TTCN PAM
ccgugccugcugaucauugg

SEQ ID NO: 33389 - RNA, 20 nt, Artificial Sequence
  HTT spacer sequence TTCN PAM
aguuaagcuugcuucuccac

SEQ ID NO: 33390 - RNA, 20 nt, Artificial Sequence
  HTT spacer sequence TTCN PAM
ccacaggccuaaauauccuu

SEQ ID NO: 33391 - RNA, 20 nt, Artificial Sequence
  HTT spacer sequence TTCN PAM
uuuauucucacuggcaggac

SEQ ID NO: 33392 - RNA, 20 nt, Artificial Sequence
  HTT spacer sequence TTCN PAM
cacuggcaggaccagggcgg

SEQ ID NO: 33393 - RNA, 20 nt, Artificial Sequence
  HTT spacer sequence TTCN PAM
agaccagccugggcaaccug

SEQ ID NO: 33394 - RNA, 20 nt, Artificial Sequence
  HTT spacer sequence TTCN PAM
caaagugcugggaucacagg

SEQ ID NO: 33395 - RNA, 20 nt, Artificial Sequence
  HTT spacer sequence TTCN PAM
guucuugauauuugauccuc

SEQ ID NO: 33396 - RNA, 20 nt, Artificial Sequence
  HTT spacer sequence TTCN PAM
ugauauuugauccucagagu

SEQ ID NO: 33397 - RNA, 20 nt, Artificial Sequence
  HTT spacer sequence TTCN PAM
gacucugaggaucaaauauc

SEQ ID NO: 33398 - RNA, 20 nt, Artificial Sequence
  HTT spacer sequence TTCN PAM
uggcaaaugggacguuaaga

SEQ ID NO: 33399 - RNA, 20 nt, Artificial Sequence
  HTT spacer sequence TTCN PAM
cucugcccucuuaacguccc

SEQ ID NO: 33400 - RNA, 20 nt, Artificial Sequence
  HTT spacer sequence TTCN PAM
uauucucucugcccucuuaa

SEQ ID NO: 33401 - RNA, 20 nt, Artificial Sequence
  HTT spacer sequence TTCN PAM
guucauauucucucugcccu

SEQ ID NO: 33402 - RNA, 20 nt, Artificial Sequence
  HTT spacer sequence TTCN PAM
aauauuggucauuuaaugug

SEQ ID NO: 33403 - RNA, 20 nt, Artificial Sequence
  HTT spacer sequence TTCN PAM
uuuuuaaaccuccuucauuu

SEQ ID NO: 33404 - RNA, 20 nt, Artificial Sequence
  HTT spacer sequence TTCN PAM
uuuuuuuuccaggaauugcu

SEQ ID NO: 33405 - RNA, 20 nt, Artificial Sequence
  HTT spacer sequence TTCN PAM
aggaauugcuggacacagug

SEQ ID NO: 33406 - RNA, 20 nt, Artificial Sequence
  HTT spacer sequence TTCN PAM
uggaaaaaaaaugaaggagg

SEQ ID NO: 33407 - RNA, 20 nt, Artificial Sequence
  HTT spacer sequence TTCN PAM
uggcugucuccuugcuucuu

SEQ ID NO: 33408 - RNA, 20 nt, Artificial Sequence
  HTT spacer sequence TTCN PAM
uucccauguccucuucuuug

SEQ ID NO: 33409 - RNA, 20 nt, Artificial Sequence
  HTT spacer sequence TTCN PAM
cauguccucuucuuuguuuc

SEQ ID NO: 33410 - RNA, 20 nt, Artificial Sequence
  HTT spacer sequence TTCN PAM
uuguuuccagccauuucucc

SEQ ID NO: 33411 - RNA, 20 nt, Artificial Sequence
  HTT spacer sequence TTCN PAM
agccauuucucccuuaugcu

SEQ ID NO: 33412 - RNA, 20 nt, Artificial Sequence
  HTT spacer sequence TTCN PAM
cccuuaugcuuaaguuuggu

SEQ ID NO: 33413 - RNA, 20 nt, Artificial Sequence
  HTT spacer sequence TTCN PAM
ugcuuccucagaugcuguag

SEQ ID NO: 33414 - RNA, 20 nt, Artificial Sequence
  HTT spacer sequence TTCN PAM
ucagaugcuguaguugucag

SEQ ID NO: 33415 - RNA, 20 nt, Artificial Sequence
  HTT spacer sequence TTCN PAM
gguccuagacuuugucuucu

SEQ ID NO: 33416 - RNA, 20 nt, Artificial Sequence
  HTT spacer sequence TTCN PAM
caugaguauggcugugugug

SEQ ID NO: 33417 - RNA, 20 nt, Artificial Sequence
  HTT spacer sequence TTCN PAM
ccauacacacacagccauac

SEQ ID NO: 33418 - RNA, 20 nt, Artificial Sequence
  HTT spacer sequence TTCN PAM
acuuagcccaagaaaauggg

SEQ ID NO: 33419 - RNA, 20 nt, Artificial Sequence
  HTT spacer sequence TTCN PAM
ugggcuaaguagaaccuagu

SEQ ID NO: 33420 - RNA, 20 nt, Artificial Sequence
  HTT spacer sequence TTCN PAM
guagagaaaugcacugggua

SEQ ID NO: 33421 - RNA, 20 nt, Artificial Sequence
  HTT spacer sequence TTCN PAM
cuacagaaaccacaugcaaa

SEQ ID NO: 33422 - RNA, 20 nt, Artificial Sequence
  HTT spacer sequence TTCN PAM
ccgccugagacuaaccuacc

SEQ ID NO: 33423 - RNA, 20 nt, Artificial Sequence
  HTT spacer sequence TTCN PAM
ugcuggacacacgugcuuca

SEQ ID NO: 33424 - RNA, 20 nt, Artificial Sequence
  HTT spacer sequence TTCN PAM
uauguggcauaaagucuccg

SEQ ID NO: 33425 - RNA, 20 nt, Artificial Sequence
  HTT spacer sequence TTCN PAM
gugaggugcuggcaaaucac

SEQ ID NO: 33426 - RNA, 20 nt, Artificial Sequence
  HTT spacer sequence TTCN PAM
gccucuugacggugguggug

SEQ ID NO: 33427 - RNA, 20 nt, Artificial Sequence
  HTT spacer sequence TTCN PAM
ugccucccuagacaaaaauc

SEQ ID NO: 33428 - RNA, 20 nt, Artificial Sequence
  HTT spacer sequence TTCN PAM
uggagucagcagccaguagg

SEQ ID NO: 33429 - RNA, 20 nt, Artificial Sequence
  HTT spacer sequence TTCN PAM
ccuacuggcugcugacucca

SEQ ID NO: 33430 - RNA, 20 nt, Artificial Sequence
  HTT spacer sequence TTCN PAM
uaaucaucaccgccucuugu

SEQ ID NO: 33431 - RNA, 20 nt, Artificial Sequence
  HTT spacer sequence TTCN PAM
uggcaccccuugagacaaga

SEQ ID NO: 33432 - RNA, 20 nt, Artificial Sequence
  HTT spacer sequence TTCN PAM
gccuccacagcuuccuggca

SEQ ID NO: 33433 - RNA, 20 nt, Artificial Sequence
  HTT spacer sequence TTCN PAM
cuaccaaacaagguacaacc

SEQ ID NO: 33434 - RNA, 20 nt, Artificial Sequence
  HTT spacer sequence TTCN PAM
agagccccuaauucucuacc

SEQ ID NO: 33435 - RNA, 20 nt, Artificial Sequence
  HTT spacer sequence TTCN PAM
uaaaugauacacuccccuga

SEQ ID NO: 33436 - RNA, 20 nt, Artificial Sequence
  HTT spacer sequence TTCN PAM
gcagacacacagguggcugc

SEQ ID NO: 33437 - RNA, 20 nt, Artificial Sequence
  HTT spacer sequence TTCN PAM
cucuugccccugcuuccgca

SEQ ID NO: 33438 - RNA, 20 nt, Artificial Sequence
  HTT spacer sequence TTCN PAM
cugcucuuaggaggggcuga

SEQ ID NO: 33439 - RNA, 20 nt, Artificial Sequence
  HTT spacer sequence TTCN PAM
cuuguuauacaauaagcuug

SEQ ID NO: 33440 - RNA, 20 nt, Artificial Sequence
  HTT spacer sequence TTCN PAM
aguuuuauuuaagaaguaau

SEQ ID NO: 33441 - RNA, 20 nt, Artificial Sequence
  HTT spacer sequence TTCN PAM
uaaauaaaacuagaagccuu

SEQ ID NO: 33442 - RNA, 20 nt, Artificial Sequence
  HTT spacer sequence TTCN PAM
acauuacuucuuaaauaaaa

SEQ ID NO: 33443 - RNA, 20 nt, Artificial Sequence
  HTT spacer sequence TTCN PAM
cuuugcucauuuaaggacuu

SEQ ID NO: 33444 - RNA, 20 nt, Artificial Sequence
  HTT spacer sequence TTCN PAM
guacaaacugcaacaacagg

SEQ ID NO: 33445 - RNA, 20 nt, Artificial Sequence
  HTT spacer sequence TTCN PAM
gagauguuuuuacuccucag

SEQ ID NO: 33446 - RNA, 20 nt, Artificial Sequence
  HTT spacer sequence TTCN PAM
gaggaguaaaaacaucucag

SEQ ID NO: 33447 - RNA, 20 nt, Artificial Sequence
  HTT spacer sequence TTCN PAM
cagaaugugaucugguuuug

SEQ ID NO: 33448 - RNA, 20 nt, Artificial Sequence
  HTT spacer sequence TTCN PAM
gggaaauucugaggaguaaa

SEQ ID NO: 33449 - RNA, 20 nt, Artificial Sequence
  HTT spacer sequence TTCN PAM
agcuugcugacccaauaggu

SEQ ID NO: 33450 - RNA, 20 nt, Artificial Sequence
  HTT spacer sequence TTCN PAM
uaaaacuuguggguuaaccu

SEQ ID NO: 33451 - RNA, 20 nt, Artificial Sequence
  HTT spacer sequence TTCN PAM
ucccucuugggugggcaagc

SEQ ID NO: 33452 - RNA, 20 nt, Artificial Sequence
  HTT spacer sequence TTCN PAM
aaaugcuugcccacccaaga

SEQ ID NO: 33453 - RNA, 20 nt, Artificial Sequence
  HTT spacer sequence TTCN PAM
cuuccaaaugcuugcccacc

SEQ ID NO: 33454 - RNA, 20 nt, Artificial Sequence
  HTT spacer sequence TTCN PAM
cugucccauccccuagcuug

SEQ ID NO: 33455 - RNA, 20 nt, Artificial Sequence
  HTT spacer sequence TTCN PAM
caagcuaggggaugggacag

SEQ ID NO: 33456 - RNA, 20 nt, Artificial Sequence
  HTT spacer sequence TTCN PAM
cuaauguggacuuugugccg

SEQ ID NO: 33457 - RNA, 20 nt, Artificial Sequence
  HTT spacer sequence TTCN PAM
agcuaguaacgaugcuaacg

SEQ ID NO: 33458 - RNA, 20 nt, Artificial Sequence
  HTT spacer sequence TTCN PAM
gguuuagccucacaagugag

SEQ ID NO: 33459 - RNA, 20 nt, Artificial Sequence
  HTT spacer sequence TTCN PAM
ucacagcacaucucucaacc

SEQ ID NO: 33460 - RNA, 20 nt, Artificial Sequence
  HTT spacer sequence TTCN PAM
gcagguguggccccuccuca

SEQ ID NO: 33461 - RNA, 20 nt, Artificial Sequence
  HTT spacer sequence TTCN PAM
caaggcggaguccugcaucc

SEQ ID NO: 33462 - RNA, 20 nt, Artificial Sequence
  HTT spacer sequence TTCN PAM
aggccagagcgagggucugu

SEQ ID NO: 33463 - RNA, 20 nt, Artificial Sequence
  HTT spacer sequence TTCN PAM
guuggaugauacgggcucag

SEQ ID NO: 33464 - RNA, 20 nt, Artificial Sequence
  HTT spacer sequence TTCN PAM
gcuagugaagauuaaagauu

SEQ ID NO: 33465 - RNA, 20 nt, Artificial Sequence
  HTT spacer sequence TTCN PAM
cuagcagaacauucuguugg

SEQ ID NO: 33466 - RNA, 20 nt, Artificial Sequence
  HTT spacer sequence TTCN PAM
cucuuguugcccaggcugga

SEQ ID NO: 33467 - RNA, 20 nt, Artificial Sequence
  HTT spacer sequence TTCN PAM
aacuauucuccugccucagc

SEQ ID NO: 33468 - RNA, 20 nt, Artificial Sequence
  HTT spacer sequence TTCN PAM
ccugccucagccucucgagu

SEQ ID NO: 33469 - RNA, 20 nt, Artificial Sequence
  HTT spacer sequence TTCN PAM
ccauguuggucaggcugguc

SEQ ID NO: 33470 - RNA, 20 nt, Artificial Sequence
  HTT spacer sequence TTCN PAM
agaccagccugaccaacaug

SEQ ID NO: 33471 - RNA, 20 nt, Artificial Sequence
  HTT spacer sequence TTCN PAM
aauacaauaaauccuggcca

SEQ ID NO: 33472 - RNA, 20 nt, Artificial Sequence
  HTT spacer sequence TTCN PAM
uuaucaucaaauacuacaua

SEQ ID NO: 33473 - RNA, 20 nt, Artificial Sequence
  HTT spacer sequence TTCN PAM
uuccauuuuucuguuuaagu

SEQ ID NO: 33474 - RNA, 20 nt, Artificial Sequence
  HTT spacer sequence TTCN PAM
auuuuucuguuuaagugaau

SEQ ID NO: 33475 - RNA, 20 nt, Artificial Sequence
  HTT spacer sequence TTCN PAM
guuuaagugaaugaccugua

SEQ ID NO: 33476 - RNA, 20 nt, Artificial Sequence
  HTT spacer sequence TTCN PAM
cuuaaacagaaaaauggaaa

SEQ ID NO: 33477 - RNA, 20 nt, Artificial Sequence
  HTT spacer sequence TTCN PAM
guaacuuccugcauauauuu

SEQ ID NO: 33478 - RNA, 20 nt, Artificial Sequence
  HTT spacer sequence TTCN PAM
ugcauauauuuguuucuuuc

SEQ ID NO: 33479 - RNA, 20 nt, Artificial Sequence
  HTT spacer sequence TTCN PAM
uucauucuuaaugaauauau

SEQ ID NO: 33480 - RNA, 20 nt, Artificial Sequence
  HTT spacer sequence TTCN PAM
uucuuaaugaauauauucuu

SEQ ID NO: 33481 - RNA, 20 nt, Artificial Sequence
  HTT spacer sequence TTCN PAM
uaaugaauauauucuuaauu

SEQ ID NO: 33482 - RNA, 20 nt, Artificial Sequence
  HTT spacer sequence TTCN PAM
uuaagaaugaaagaaacaaa

SEQ ID NO: 33483 - RNA, 20 nt, Artificial Sequence
  HTT spacer sequence TTCN PAM
uaauuuaguugcuauuaugu

SEQ ID NO: 33484 - RNA, 20 nt, Artificial Sequence
  HTT spacer sequence TTCN PAM
auuuuggggcaaagcaaaac

SEQ ID NO: 33485 - RNA, 20 nt, Artificial Sequence
  HTT spacer sequence TTCN PAM
uuuuagcucguuuuagaacu

SEQ ID NO: 33486 - RNA, 20 nt, Artificial Sequence
  HTT spacer sequence TTCN PAM
aaaacgagcuaaaaggaaac

SEQ ID NO: 33487 - RNA, 20 nt, Artificial Sequence
  HTT spacer sequence TTCN PAM
auaaaucucuugugauuugu

SEQ ID NO: 33488 - RNA, 20 nt, Artificial Sequence
  HTT spacer sequence TTCN PAM
aaucuuccaagguuacagcu

SEQ ID NO: 33489 - RNA, 20 nt, Artificial Sequence
  HTT spacer sequence TTCN PAM
aagguuacagcucgagcucu

SEQ ID NO: 33490 - RNA, 20 nt, Artificial Sequence
  HTT spacer sequence TTCN PAM
uuauagagcucgagcuguaa

SEQ ID NO: 33491 - RNA, 20 nt, Artificial Sequence
  HTT spacer sequence TTCN PAM
uuuuuaaaaauguuuuaaau

SEQ ID NO: 33492 - RNA, 20 nt, Artificial Sequence
  HTT spacer sequence TTCN PAM
auggugugauuauuauguau

SEQ ID NO: 33493 - RNA, 20 nt, Artificial Sequence
  HTT spacer sequence TTCN PAM
cccaugcuagaguacagugg

SEQ ID NO: 33494 - RNA, 20 nt, Artificial Sequence
  HTT spacer sequence TTCN PAM
accgaacuuugggcuggucu

SEQ ID NO: 33495 - RNA, 20 nt, Artificial Sequence
  HTT spacer sequence TTCN PAM
guugaacccgggaggcggag

SEQ ID NO: 33496 - RNA, 20 nt, Artificial Sequence
  HTT spacer sequence TTCN PAM
agaccagccuggccaacaug

SEQ ID NO: 33497 - RNA, 20 nt, Artificial Sequence
  HTT spacer sequence TTCN PAM
ccauguuggccaggcugguc

SEQ ID NO: 33498 - RNA, 20 nt, Artificial Sequence
  HTT spacer sequence TTCN PAM
ccuaccucagccucccgagu

SEQ ID NO: 33499 - RNA, 20 nt, Artificial Sequence
  HTT spacer sequence TTCN PAM
agcgauuccccuaccucagc

SEQ ID NO: 33500 - RNA, 20 nt, Artificial Sequence
  HTT spacer sequence TTCN PAM
agccugagcgacagagugag

SEQ ID NO: 33501 - RNA, 20 nt, Artificial Sequence
  HTT spacer sequence TTCN PAM
uuuuuauuuuuugagacaaa

SEQ ID NO: 33502 - RNA, 20 nt, Artificial Sequence
  HTT spacer sequence TTCN PAM
caaagugcugggacuaaggu

SEQ ID NO: 33503 - RNA, 20 nt, Artificial Sequence
  HTT spacer sequence TTCN PAM
guacagacagcguuuugcca

SEQ ID NO: 33504 - RNA, 20 nt, Artificial Sequence
  HTT spacer sequence TTCN PAM
aggcucaauuaauccuccca

SEQ ID NO: 33505 - RNA, 20 nt, Artificial Sequence
  HTT spacer sequence TTCN PAM
accuuccaggcucaauuaau

SEQ ID NO: 33506 - RNA, 20 nt, Artificial Sequence
  HTT spacer sequence TTCN PAM
gccugggcgaccaagugaga

SEQ ID NO: 33507 - RNA, 20 nt, Artificial Sequence
  HTT spacer sequence TTCN PAM
uuugagacagggucucacuu

SEQ ID NO: 33508 - RNA, 20 nt, Artificial Sequence
  HTT spacer sequence TTCN PAM
acagcacagcagagggauca

SEQ ID NO: 33509 - RNA, 20 nt, Artificial Sequence
  HTT spacer sequence TTCN PAM
aucacugagcaaacuucacu

SEQ ID NO: 33510 - RNA, 20 nt, Artificial Sequence
  HTT spacer sequence TTCN PAM
cucuguuaagcagcaggugu

SEQ ID NO: 33511 - RNA, 20 nt, Artificial Sequence
  HTT spacer sequence TTCN PAM
ucguuauucaguaauucaca

SEQ ID NO: 33512 - RNA, 20 nt, Artificial Sequence
  HTT spacer sequence TTCN PAM
guaauucacaauguuagaag

SEQ ID NO: 33513 - RNA, 20 nt, Artificial Sequence
  HTT spacer sequence TTCN PAM
caauguuagaaggaaaugcu

SEQ ID NO: 33514 - RNA, 20 nt, Artificial Sequence
  HTT spacer sequence TTCN PAM
aacauugugaauuacugaau

SEQ ID NO: 33515 - RNA, 20 nt, Artificial Sequence
  HTT spacer sequence TTCN PAM
uucuaacauugugaauuacu

SEQ ID NO: 33516 - RNA, 20 nt, Artificial Sequence
  HTT spacer sequence TTCN PAM
ucaaaagguuacucuuuauu

SEQ ID NO: 33517 - RNA, 20 nt, Artificial Sequence
  HTT spacer sequence TTCN PAM
aaagguuacucuuuauuaga

SEQ ID NO: 33518 - RNA, 20 nt, Artificial Sequence
  HTT spacer sequence TTCN PAM
caucucaucuaauaaagagu

SEQ ID NO: 33519 - RNA, 20 nt, Artificial Sequence
  HTT spacer sequence TTCN PAM
auuauaaagauauaaaguaa

SEQ ID NO: 33520 - RNA, 20 nt, Artificial Sequence
  HTT spacer sequence TTCN PAM
cuaaaauuagaaaguaacaa

SEQ ID NO: 33521 - RNA, 20 nt, Artificial Sequence
  HTT spacer sequence TTCN PAM
aauuuuagagaaaaggccau

SEQ ID NO: 33522 - RNA, 20 nt, Artificial Sequence
  HTT spacer sequence TTCN PAM
uuguuacuuucuaauuuuag

SEQ ID NO: 33523 - RNA, 20 nt, Artificial Sequence
  HTT spacer sequence TTCN PAM
uuccuuguuacuuucuaauu

SEQ ID NO: 33524 - RNA, 20 nt, Artificial Sequence
  HTT spacer sequence TTCN PAM
uuucuaugcaacccucuugg

SEQ ID NO: 33525 - RNA, 20 nt, Artificial Sequence
  HTT spacer sequence TTCN PAM
augcaacccucuuggugacu

SEQ ID NO: 33526 - RNA, 20 nt, Artificial Sequence
  HTT spacer sequence TTCN PAM
gagggggugcaaugaggguu

SEQ ID NO: 33527 - RNA, 20 nt, Artificial Sequence
  HTT spacer sequence TTCN PAM
gccucagaaaugcagguaag

SEQ ID NO: 33528 - RNA, 20 nt, Artificial Sequence
  HTT spacer sequence TTCN PAM
gaggccgaaccaggugagcc

SEQ ID NO: 33529 - RNA, 20 nt, Artificial Sequence
  HTT spacer sequence TTCN PAM
aaagucugcucugcccucuc

SEQ ID NO: 33530 - RNA, 20 nt, Artificial Sequence
  HTT spacer sequence TTCN PAM
cucauagcacuaauccaugu

SEQ ID NO: 33531 - RNA, 20 nt, Artificial Sequence
  HTT spacer sequence TTCN PAM
gacauggauuagugcuauga

SEQ ID NO: 33532 - RNA, 20 nt, Artificial Sequence
  HTT spacer sequence TTCN PAM
aucccacccuuccgcaagag

SEQ ID NO: 33533 - RNA, 20 nt, Artificial Sequence
  HTT spacer sequence TTCN PAM
gcaagagacuuaugggaugu

SEQ ID NO: 33534 - RNA, 20 nt, Artificial Sequence
  HTT spacer sequence TTCN PAM
acaauuuggcaaguaucuuu

SEQ ID NO: 33535 - RNA, 20 nt, Artificial Sequence
  HTT spacer sequence TTCN PAM
uuauugcugacuauaggagu

SEQ ID NO: 33536 - RNA, 20 nt, Artificial Sequence
  HTT spacer sequence TTCN PAM
cagugcaacaaccauauuuu

SEQ ID NO: 33537 - RNA, 20 nt, Artificial Sequence
  HTT spacer sequence TTCN PAM
caauccguuaagauacaacu

SEQ ID NO: 33538 - RNA, 20 nt, Artificial Sequence
  HTT spacer sequence TTCN PAM
ucagcucccuccuucuccuu

SEQ ID NO: 33539 - RNA, 20 nt, Artificial Sequence
  HTT spacer sequence TTCN PAM
ccuuaaccagcaauacaugc

SEQ ID NO: 33540 - RNA, 20 nt, Artificial Sequence
  HTT spacer sequence TTCN PAM
cagugacucaggauggagcu

SEQ ID NO: 33541 - RNA, 20 nt, Artificial Sequence
  HTT spacer sequence TTCN PAM
uauuaauagugaggguuuag

SEQ ID NO: 33542 - RNA, 20 nt, Artificial Sequence
  HTT spacer sequence TTCN PAM
auaagaaucuuauauggguc

SEQ ID NO: 33543 - RNA, 20 nt, Artificial Sequence
  HTT spacer sequence TTCN PAM
uauugaaacucaguucauau

SEQ ID NO: 33544 - RNA, 20 nt, Artificial Sequence
  HTT spacer sequence TTCN PAM
ggaggccaaggcagguggau

SEQ ID NO: 33545 - RNA, 20 nt, Artificial Sequence
  HTT spacer sequence TTCN PAM
ccauguugccuagucugggu

SEQ ID NO: 33546 - RNA, 20 nt, Artificial Sequence
  HTT spacer sequence TTCN PAM
ggauuuugguuuuuuugaga

SEQ ID NO: 33547 - RNA, 20 nt, Artificial Sequence
  HTT spacer sequence TTCN PAM
uuucuggauuuugguuuuuu

SEQ ID NO: 33548 - RNA, 20 nt, Artificial Sequence
  HTT spacer sequence TTCN PAM
uuagugauuauaccucugca

SEQ ID NO: 33549 - RNA, 20 nt, Artificial Sequence
  HTT spacer sequence TTCN PAM
uuuuguauaaucuuuuuucu

SEQ ID NO: 33550 - RNA, 20 nt, Artificial Sequence
  HTT spacer sequence TTCN PAM
uuuacuaucauuuaaaaaaa

SEQ ID NO: 33551 - RNA, 20 nt, Artificial Sequence
  HTT spacer sequence TTCN PAM
gaagcaacacauccagguuc

SEQ ID NO: 33552 - RNA, 20 nt, Artificial Sequence
  HTT spacer sequence TTCN PAM
gaaauauaacacauuuuuuu

SEQ ID NO: 33553 - RNA, 20 nt, Artificial Sequence
  HTT spacer sequence TTCN PAM
gcacauagcagccaaaguga

SEQ ID NO: 33554 - RNA, 20 nt, Artificial Sequence
  HTT spacer sequence TTCN PAM
uuaaggucacuuuggcugcu

SEQ ID NO: 33555 - RNA, 20 nt, Artificial Sequence
  HTT spacer sequence TTCN PAM
cuuauuuaaacucuuguacc

SEQ ID NO: 33556 - RNA, 20 nt, Artificial Sequence
  HTT spacer sequence TTCN PAM
cagugccguuuagauagaga

SEQ ID NO: 33557 - RNA, 20 nt, Artificial Sequence
  HTT spacer sequence TTCN PAM
agacucgucaauggcucugu

SEQ ID NO: 33558 - RNA, 20 nt, Artificial Sequence
  HTT spacer sequence TTCN PAM
uccuccugaugguuuuuuuu

SEQ ID NO: 33559 - RNA, 20 nt, Artificial Sequence
  HTT spacer sequence TTCN PAM
uccugaugguuuuuuuuucc

SEQ ID NO: 33560 - RNA, 20 nt, Artificial Sequence
  HTT spacer sequence TTCN PAM
cccuuaguucucagcggaac

SEQ ID NO: 33561 - RNA, 20 nt, Artificial Sequence
  HTT spacer sequence TTCN PAM
cagcggaacagucacuuccu

SEQ ID NO: 33562 - RNA, 20 nt, Artificial Sequence
  HTT spacer sequence TTCN PAM
gcugagaacuaagggggaaa

SEQ ID NO: 33563 - RNA, 20 nt, Artificial Sequence
  HTT spacer sequence TTCN PAM
uuagggagguuuccccagcc

SEQ ID NO: 33564 - RNA, 20 nt, Artificial Sequence
  HTT spacer sequence TTCN PAM
ccagccacccucugaggccg

SEQ ID NO: 33565 - RNA, 20 nt, Artificial Sequence
  HTT spacer sequence TTCN PAM
cccaacacacagagugacag

SEQ ID NO: 33566 - RNA, 20 nt, Artificial Sequence
  HTT spacer sequence TTCN PAM
ugugaucugugacucacugc

SEQ ID NO: 33567 - RNA, 20 nt, Artificial Sequence
  HTT spacer sequence TTCN PAM
gcuuuucuucucuccccaca

SEQ ID NO: 33568 - RNA, 20 nt, Artificial Sequence
  HTT spacer sequence TTCN PAM
ucucuccccacaaccccauu

SEQ ID NO: 33569 - RNA, 20 nt, Artificial Sequence
  HTT spacer sequence TTCN PAM
cuccccacaaccccauuuua

SEQ ID NO: 33570 - RNA, 20 nt, Artificial Sequence
  HTT spacer sequence TTCN PAM
ccuuuuucaggaaagcuuua

SEQ ID NO: 33571 - RNA, 20 nt, Artificial Sequence
  HTT spacer sequence TTCN PAM
ggaaagcuuuauucccauuu

SEQ ID NO: 33572 - RNA, 20 nt, Artificial Sequence
  HTT spacer sequence TTCN PAM
ugaaaaaggagaauuauaaa

SEQ ID NO: 33573 - RNA, 20 nt, Artificial Sequence
  HTT spacer sequence TTCN PAM
cauuuaaaaauuuuuguuuu

SEQ ID NO: 33574 - RNA, 20 nt, Artificial Sequence
  HTT spacer sequence TTCN PAM
uacacuuauuuucuaauuaa

SEQ ID NO: 33575 - RNA, 20 nt, Artificial Sequence
  HTT spacer sequence TTCN PAM
aauuaaaaaugaguguuuua

SEQ ID NO: 33576 - RNA, 20 nt, Artificial Sequence
  HTT spacer sequence TTCN PAM
uaaaacacucauuuuuaauu

SEQ ID NO: 33577 - RNA, 20 nt, Artificial Sequence
  HTT spacer sequence TTCN PAM
cuuaugaucacagaggaucu

SEQ ID NO: 33578 - RNA, 20 nt, Artificial Sequence
  HTT spacer sequence TTCN PAM
uuucucuuaugaucacagag

SEQ ID NO: 33579 - RNA, 20 nt, Artificial Sequence
  HTT spacer sequence TTCN PAM
uccacauuucauccuccugu

SEQ ID NO: 33580 - RNA, 20 nt, Artificial Sequence
  HTT spacer sequence TTCN PAM
uccuccuguucuuucagcug

SEQ ID NO: 33581 - RNA, 20 nt, Artificial Sequence
  HTT spacer sequence TTCN PAM
uucagcugaguuuuccccau

SEQ ID NO: 33582 - RNA, 20 nt, Artificial Sequence
  HTT spacer sequence TTCN PAM
gcugaguuuuccccauccca

SEQ ID NO: 33583 - RNA, 20 nt, Artificial Sequence
  HTT spacer sequence TTCN PAM
ccaucccauuagggacuguu

SEQ ID NO: 33584 - RNA, 20 nt, Artificial Sequence
  HTT spacer sequence TTCN PAM
aacagucccuaaugggaugg

SEQ ID NO: 33585 - RNA, 20 nt, Artificial Sequence
  HTT spacer sequence TTCN PAM
cuaacagggaaugaauugcu

SEQ ID NO: 33586 - RNA, 20 nt, Artificial Sequence
  HTT spacer sequence TTCN PAM
cuguuagggaaaagccaguu

SEQ ID NO: 33587 - RNA, 20 nt, Artificial Sequence
  HTT spacer sequence TTCN PAM
uucccuguuagggaaaagcc

SEQ ID NO: 33588 - RNA, 20 nt, Artificial Sequence
  HTT spacer sequence TTCN PAM
guuucuccugaaggagagcu

SEQ ID NO: 33589 - RNA, 20 nt, Artificial Sequence
  HTT spacer sequence TTCN PAM
ccugaaggagagcuggaaga

SEQ ID NO: 33590 - RNA, 20 nt, Artificial Sequence
  HTT spacer sequence TTCN PAM
ggagaaacagaagcaauuca

SEQ ID NO: 33591 - RNA, 20 nt, Artificial Sequence
  HTT spacer sequence TTCN PAM
agcucuccuucaggagaaac

SEQ ID NO: 33592 - RNA, 20 nt, Artificial Sequence
  HTT spacer sequence TTCN PAM
uccagcucuccuucaggaga

SEQ ID NO: 33593 - RNA, 20 nt, Artificial Sequence
  HTT spacer sequence TTCN PAM
uuugcauacacaggccuuac

SEQ ID NO: 33594 - RNA, 20 nt, Artificial Sequence
  HTT spacer sequence TTCN PAM
ccagguaaggccuguguaug

SEQ ID NO: 33595 - RNA, 20 nt, Artificial Sequence
  HTT spacer sequence TTCN PAM
gccgugccugacucgaacaa

SEQ ID NO: 33596 - RNA, 20 nt, Artificial Sequence
  HTT spacer sequence TTCN PAM
agucaggcacggcagaaggu

SEQ ID NO: 33597 - RNA, 20 nt, Artificial Sequence
  HTT spacer sequence TTCN PAM
ggucucuugcuuguucgagu

SEQ ID NO: 33598 - RNA, 20 nt, Artificial Sequence
  HTT spacer sequence TTCN PAM
ucgggucucuugcuuguucg

SEQ ID NO: 33599 - RNA, 20 nt, Artificial Sequence
  HTT spacer sequence TTCN PAM
caaaauuauggcuucuuuug

SEQ ID NO: 33600 - RNA, 20 nt, Artificial Sequence
  HTT spacer sequence TTCN PAM
uuuggcaauuuugcaaauga

SEQ ID NO: 33601 - RNA, 20 nt, Artificial Sequence
  HTT spacer sequence TTCN PAM
uugucauuugcaaaauugcc

SEQ ID NO: 33602 - RNA, 20 nt, Artificial Sequence
  HTT spacer sequence TTCN PAM
gaacagggaguccuguggga

SEQ ID NO: 33603 - RNA, 20 nt, Artificial Sequence
  HTT spacer sequence TTCN PAM
gaagcccucacccuccacag

SEQ ID NO: 33604 - RNA, 20 nt, Artificial Sequence
  HTT spacer sequence TTCN PAM
ugggguauguuguaugucgu

SEQ ID NO: 33605 - RNA, 20 nt, Artificial Sequence
  HTT spacer sequence TTCN PAM
uuccacuucucauuucuuac

SEQ ID NO: 33606 - RNA, 20 nt, Artificial Sequence
  HTT spacer sequence TTCN PAM
acuucucauuucuuacugug

SEQ ID NO: 33607 - RNA, 20 nt, Artificial Sequence
  HTT spacer sequence TTCN PAM
cauuucuuacugugggguga

SEQ ID NO: 33608 - RNA, 20 nt, Artificial Sequence
  HTT spacer sequence TTCN PAM
uacuguggggugaagaguug

SEQ ID NO: 33609 - RNA, 20 nt, Artificial Sequence
  HTT spacer sequence TTCN PAM
ccccacaguaagaaaugaga

SEQ ID NO: 33610 - RNA, 20 nt, Artificial Sequence
  HTT spacer sequence TTCN PAM
acucuucaccccacaguaag

SEQ ID NO: 33611 - RNA, 20 nt, Artificial Sequence
  HTT spacer sequence TTCN PAM
agaugcaaauugaaaaggca

SEQ ID NO: 33612 - RNA, 20 nt, Artificial Sequence
  HTT spacer sequence TTCN PAM
auuugcaucuagaaaccauc

SEQ ID NO: 33613 - RNA, 20 nt, Artificial Sequence
  HTT spacer sequence TTCN PAM
agagcagauuuguuuucggc

SEQ ID NO: 33614 - RNA, 20 nt, Artificial Sequence
  HTT spacer sequence TTCN PAM
gcguacuagagugacucuuu

SEQ ID NO: 33615 - RNA, 20 nt, Artificial Sequence
  HTT spacer sequence TTCN PAM
cgcagcuagguuaaagaguc

SEQ ID NO: 33616 - RNA, 20 nt, Artificial Sequence
  HTT spacer sequence TTCN PAM
ccuaccugcagucuuggcac

SEQ ID NO: 33617 - RNA, 20 nt, Artificial Sequence
  HTT spacer sequence TTCN PAM
gacccacaaggccucgucag

SEQ ID NO: 33618 - RNA, 20 nt, Artificial Sequence
  HTT spacer sequence TTCN PAM
uguugugcauuccaacaaau

SEQ ID NO: 33619 - RNA, 20 nt, Artificial Sequence
  HTT spacer sequence TTCN PAM
aacaaaucaucuucaaaccc

SEQ ID NO: 33620 - RNA, 20 nt, Artificial Sequence
  HTT spacer sequence TTCN PAM
aacccacuuuaguguuuugu

SEQ ID NO: 33621 - RNA, 20 nt, Artificial Sequence
  HTT spacer sequence TTCN PAM
ggacauuauaaacaaaacac

SEQ ID NO: 33622 - RNA, 20 nt, Artificial Sequence
  HTT spacer sequence TTCN PAM
uagccucuuccuuuuuggua

SEQ ID NO: 33623 - RNA, 20 nt, Artificial Sequence
  HTT spacer sequence TTCN PAM
uuuuugguaggucaguccug

SEQ ID NO: 33624 - RNA, 20 nt, Artificial Sequence
  HTT spacer sequence TTCN PAM
acucuacccaguguguauca

SEQ ID NO: 33625 - RNA, 20 nt, Artificial Sequence
  HTT spacer sequence TTCN PAM
aauccaaguccaucugauuc

SEQ ID NO: 33626 - RNA, 20 nt, Artificial Sequence
  HTT spacer sequence TTCN PAM
guccucuuuacuaguuauuu

SEQ ID NO: 33627 - RNA, 20 nt, Artificial Sequence
  HTT spacer sequence TTCN PAM
ucuaggcaaacugcccaaca

SEQ ID NO: 33628 - RNA, 20 nt, Artificial Sequence
  HTT spacer sequence TTCN PAM
uucguauucugaaaaauaag

SEQ ID NO: 33629 - RNA, 20 nt, Artificial Sequence
  HTT spacer sequence TTCN PAM
uauucugaaaaauaagccuu

SEQ ID NO: 33630 - RNA, 20 nt, Artificial Sequence
  HTT spacer sequence TTCN PAM
gaaaaauaagccuuaauggg

SEQ ID NO: 33631 - RNA, 20 nt, Artificial Sequence
  HTT spacer sequence TTCN PAM
gaauacgaaggaaauagcuu

SEQ ID NO: 33632 - RNA, 20 nt, Artificial Sequence
  HTT spacer sequence TTCN PAM
uuuauuuuacucucagaguu

SEQ ID NO: 33633 - RNA, 20 nt, Artificial Sequence
  HTT spacer sequence TTCN PAM
cgugggugacuaugcuacac

SEQ ID NO: 33634 - RNA, 20 nt, Artificial Sequence
  HTT spacer sequence TTCN PAM
gcuaauaagagcaguagcag

SEQ ID NO: 33635 - RNA, 20 nt, Artificial Sequence
  HTT spacer sequence TTCN PAM
aaaucauucagcuaauaaga

SEQ ID NO: 33636 - RNA, 20 nt, Artificial Sequence
  HTT spacer sequence TTCN PAM
cuugagcuucgaaguuuucu

SEQ ID NO: 33637 - RNA, 20 nt, Artificial Sequence
  HTT spacer sequence TTCN PAM
aaguuuucuuguuaauacua

SEQ ID NO: 33638 - RNA, 20 nt, Artificial Sequence
  HTT spacer sequence TTCN PAM
aagcucaagagaaaaaacau

SEQ ID NO: 33639 - RNA, 20 nt, Artificial Sequence
  HTT spacer sequence TTCN PAM
uguuaauacuaaggagauau

SEQ ID NO: 33640 - RNA, 20 nt, Artificial Sequence
  HTT spacer sequence TTCN PAM
aacuagucaugggguuuugg

SEQ ID NO: 33641 - RNA, 20 nt, Artificial Sequence
  HTT spacer sequence TTCN PAM
aaaaccccaugacuaguuug

SEQ ID NO: 33642 - RNA, 20 nt, Artificial Sequence
  HTT spacer sequence TTCN PAM
ucauuccaaaaccccaugac

SEQ ID NO: 33643 - RNA, 20 nt, Artificial Sequence
  HTT spacer sequence TTCN PAM
ucaucucccuucgucauucc

SEQ ID NO: 33644 - RNA, 20 nt, Artificial Sequence
  HTT spacer sequence TTCN PAM
uuagauucaucaucucccuu

SEQ ID NO: 33645 - RNA, 20 nt, Artificial Sequence
  HTT spacer sequence TTCN PAM
ucaugcucaguaaaugguag

SEQ ID NO: 33646 - RNA, 20 nt, Artificial Sequence
  HTT spacer sequence TTCN PAM
ugcucaguaaaugguaguuu

SEQ ID NO: 33647 - RNA, 20 nt, Artificial Sequence
  HTT spacer sequence TTCN PAM
gcugcuguuauuuuuauuac

SEQ ID NO: 33648 - RNA, 20 nt, Artificial Sequence
  HTT spacer sequence TTCN PAM
aaagagaugguaauaaaaau

SEQ ID NO: 33649 - RNA, 20 nt, Artificial Sequence
  HTT spacer sequence TTCN PAM
acagaccccaguguacagau

SEQ ID NO: 33650 - RNA, 20 nt, Artificial Sequence
  HTT spacer sequence TTCN PAM
caucauuuucaugauuucga

SEQ ID NO: 33651 - RNA, 20 nt, Artificial Sequence
  HTT spacer sequence TTCN PAM
ugauuucgaucaccauuuga

SEQ ID NO: 33652 - RNA, 20 nt, Artificial Sequence
  HTT spacer sequence TTCN PAM
aucaccauuugaguaugaug

SEQ ID NO: 33653 - RNA, 20 nt, Artificial Sequence
  HTT spacer sequence TTCN PAM
acaaaguguuagcaucauca

SEQ ID NO: 33654 - RNA, 20 nt, Artificial Sequence
  HTT spacer sequence TTCN PAM
acguucaacaaaguguuagc

SEQ ID NO: 33655 - RNA, 20 nt, Artificial Sequence
  HTT spacer sequence TTCN PAM
uuccugaaccuuuggcauua

SEQ ID NO: 33656 - RNA, 20 nt, Artificial Sequence
  HTT spacer sequence TTCN PAM
ugaaccuuuggcauuaaaaa

SEQ ID NO: 33657 - RNA, 20 nt, Artificial Sequence
  HTT spacer sequence TTCN PAM
ggaaggaaguaauuaacgga

SEQ ID NO: 33658 - RNA, 20 nt, Artificial Sequence
  HTT spacer sequence TTCN PAM
gcuaccucucugcucauuua

SEQ ID NO: 33659 - RNA, 20 nt, Artificial Sequence
  HTT spacer sequence TTCN PAM
aauuuauuaucaagagccug

SEQ ID NO: 33660 - RNA, 20 nt, Artificial Sequence
  HTT spacer sequence TTCN PAM
guuuuuuuagagauaggguc

SEQ ID NO: 33661 - RNA, 20 nt, Artificial Sequence
  HTT spacer sequence TTCN PAM
aggcuacacugagcugugau

SEQ ID NO: 33662 - RNA, 20 nt, Artificial Sequence
  HTT spacer sequence TTCN PAM
uaaaaaaaaaaaauauauau

SEQ ID NO: 33663 - RNA, 20 nt, Artificial Sequence
  HTT spacer sequence TTCN PAM
uugauaauauauauauauau

SEQ ID NO: 33664 - RNA, 20 nt, Artificial Sequence
  HTT spacer sequence TTCN PAM
guaguaccaacaggauuaua

SEQ ID NO: 33665 - RNA, 20 nt, Artificial Sequence
  HTT spacer sequence TTCN PAM
cuuccuacuuuuucucuuaa

SEQ ID NO: 33666 - RNA, 20 nt, Artificial Sequence
  HTT spacer sequence TTCN PAM
uacuuuuucucuuaauccuu

SEQ ID NO: 33667 - RNA, 20 nt, Artificial Sequence
  HTT spacer sequence TTCN PAM
cuuaauccuugugucucaca

SEQ ID NO: 33668 - RNA, 20 nt, Artificial Sequence
  HTT spacer sequence TTCN PAM
uccaauauuuacuuucaugu

SEQ ID NO: 33669 - RNA, 20 nt, Artificial Sequence
  HTT spacer sequence TTCN PAM
aauauuuacuuucauguuuc

SEQ ID NO: 33670 - RNA, 20 nt, Artificial Sequence
  HTT spacer sequence TTCN PAM
uguuucuuucuuucuuucuu

SEQ ID NO: 33671 - RNA, 20 nt, Artificial Sequence
  HTT spacer sequence TTCN PAM
uucuuucuuucuuuuuuuuu

SEQ ID NO: 33672 - RNA, 20 nt, Artificial Sequence
  HTT spacer sequence TTCN PAM
uucuuucuuuuuuuuucuuu

SEQ ID NO: 33673 - RNA, 20 nt, Artificial Sequence
  HTT spacer sequence TTCN PAM
uucuuuuuuuuucuuugaga

SEQ ID NO: 33674 - RNA, 20 nt, Artificial Sequence
  HTT spacer sequence TTCN PAM
uuuuuuuucuuugagaugga

SEQ ID NO: 33675 - RNA, 20 nt, Artificial Sequence
  HTT spacer sequence TTCN PAM
uugagauggaguuuugcucu

SEQ ID NO: 33676 - RNA, 20 nt, Artificial Sequence
  HTT spacer sequence TTCN PAM
agcgauucuccugccucagc

SEQ ID NO: 33677 - RNA, 20 nt, Artificial Sequence
  HTT spacer sequence TTCN PAM
ccugccucagccuccuagua

SEQ ID NO: 33678 - RNA, 20 nt, Artificial Sequence
  HTT spacer sequence TTCN PAM
ccggguuggucaggcugguc

SEQ ID NO: 33679 - RNA, 20 nt, Artificial Sequence
  HTT spacer sequence TTCN PAM
agaccagccugaccaacccg

SEQ ID NO: 33680 - RNA, 20 nt, Artificial Sequence
  HTT spacer sequence TTCN PAM
acauuucuaaauaacaugcu

SEQ ID NO: 33681 - RNA, 20 nt, Artificial Sequence
  HTT spacer sequence TTCN PAM
aaauaacaugcuucuacugc

SEQ ID NO: 33682 - RNA, 20 nt, Artificial Sequence
  HTT spacer sequence TTCN PAM
acugcuauuuuuuuuuucaa

SEQ ID NO: 33683 - RNA, 20 nt, Artificial Sequence
  HTT spacer sequence TTCN PAM
auuuuagacauuuuuuuacu

SEQ ID NO: 33684 - RNA, 20 nt, Artificial Sequence
  HTT spacer sequence TTCN PAM
cuauaguucuaucagaauuc

SEQ ID NO: 33685 - RNA, 20 nt, Artificial Sequence
  HTT spacer sequence TTCN PAM
aucagaauucaguguguacg

SEQ ID NO: 33686 - RNA, 20 nt, Artificial Sequence
  HTT spacer sequence TTCN PAM
gauagaacuauagugaaagu

SEQ ID NO: 33687 - RNA, 20 nt, Artificial Sequence
  HTT spacer sequence TTCN PAM
guguguacguuauuaugccu

SEQ ID NO: 33688 - RNA, 20 nt, Artificial Sequence
  HTT spacer sequence TTCN PAM
uugauuguguuucuuauuug

SEQ ID NO: 33689 - RNA, 20 nt, Artificial Sequence
  HTT spacer sequence TTCN PAM
uauuugaugagaaagcugug

SEQ ID NO: 33690 - RNA, 20 nt, Artificial Sequence
  HTT spacer sequence TTCN PAM
caucaaauaagaaacacaau

SEQ ID NO: 33691 - RNA, 20 nt, Artificial Sequence
  HTT spacer sequence TTCN PAM
acccagagcaaaaaacacag

SEQ ID NO: 33692 - RNA, 20 nt, Artificial Sequence
  HTT spacer sequence TTCN PAM
ucuguccuccuccuccuccc

SEQ ID NO: 33693 - RNA, 20 nt, Artificial Sequence
  HTT spacer sequence TTCN PAM
uggccauagcuggguucuca

SEQ ID NO: 33694 - RNA, 20 nt, Artificial Sequence
  HTT spacer sequence TTCN PAM
cagcacccggggaucugcug

SEQ ID NO: 33695 - RNA, 20 nt, Artificial Sequence
  HTT spacer sequence TTCN PAM
auaggggccuggccuaugag

SEQ ID NO: 33696 - RNA, 20 nt, Artificial Sequence
  HTT spacer sequence TTCN PAM
aggugacccagugcugggga

SEQ ID NO: 33697 - RNA, 20 nt, Artificial Sequence
  HTT spacer sequence TTCN PAM
uaaggaugcuggccccagca

SEQ ID NO: 33698 - RNA, 20 nt, Artificial Sequence
  HTT spacer sequence TTCN PAM
ugauuggggccuucagcagc

SEQ ID NO: 33699 - RNA, 20 nt, Artificial Sequence
  HTT spacer sequence TTCN PAM
gcagcaccagcuucuugggc

SEQ ID NO: 33700 - RNA, 20 nt, Artificial Sequence
  HTT spacer sequence TTCN PAM
ugggcaggcuggugcuggcu

SEQ ID NO: 33701 - RNA, 20 nt, Artificial Sequence
  HTT spacer sequence TTCN PAM
ucaccaugucguguucaauc

SEQ ID NO: 33702 - RNA, 20 nt, Artificial Sequence
  HTT spacer sequence TTCN PAM
aucuucuuccagauccugac

SEQ ID NO: 33703 - RNA, 20 nt, Artificial Sequence
  HTT spacer sequence TTCN PAM
uccagauccugacuucuagg

SEQ ID NO: 33704 - RNA, 20 nt, Artificial Sequence
  HTT spacer sequence TTCN PAM
agauccugacuucuagguuc

SEQ ID NO: 33705 - RNA, 20 nt, Artificial Sequence
  HTT spacer sequence TTCN PAM
agguucagcuuuccucagac

SEQ ID NO: 33706 - RNA, 20 nt, Artificial Sequence
  HTT spacer sequence TTCN PAM
gcuuuccucagacccugguu

SEQ ID NO: 33707 - RNA, 20 nt, Artificial Sequence
  HTT spacer sequence TTCN PAM
ucagacccugguuccuuuca

SEQ ID NO: 33708 - RNA, 20 nt, Artificial Sequence
  HTT spacer sequence TTCN PAM
uuucagaggccauugcugcu

SEQ ID NO: 33709 - RNA, 20 nt, Artificial Sequence
  HTT spacer sequence TTCN PAM
gaggccauugcugcugccuu

SEQ ID NO: 33710 - RNA, 20 nt, Artificial Sequence
  HTT spacer sequence TTCN PAM
uggaguuaaucuucacaucu

SEQ ID NO: 33711 - RNA, 20 nt, Artificial Sequence
  HTT spacer sequence TTCN PAM
caucuguuuucuuggaguua

SEQ ID NO: 33712 - RNA, 20 nt, Artificial Sequence
  HTT spacer sequence TTCN PAM
uggaguuaaucguuaccucu

SEQ ID NO: 33713 - RNA, 20 nt, Artificial Sequence
  HTT spacer sequence TTCN PAM
uuggccuuuuugucuucuca

SEQ ID NO: 33714 - RNA, 20 nt, Artificial Sequence
  HTT spacer sequence TTCN PAM
cacaccuuccaacuucuuug

SEQ ID NO: 33715 - RNA, 20 nt, Artificial Sequence
  HTT spacer sequence TTCN PAM
aacuucuuuguaauaugugu

SEQ ID NO: 33716 - RNA, 20 nt, Artificial Sequence
  HTT spacer sequence TTCN PAM
uuguaauauguguuuaguac

SEQ ID NO: 33717 - RNA, 20 nt, Artificial Sequence
  HTT spacer sequence TTCN PAM
ugacagguaguuuacugaau

SEQ ID NO: 33718 - RNA, 20 nt, Artificial Sequence
  HTT spacer sequence TTCN PAM
guaaacuaccugucaugaaa

SEQ ID NO: 33719 - RNA, 20 nt, Artificial Sequence
  HTT spacer sequence TTCN PAM
ccaguguggucauccaacuu

SEQ ID NO: 33720 - RNA, 20 nt, Artificial Sequence
  HTT spacer sequence TTCN PAM
ggucuguaguacacuuguau

SEQ ID NO: 33721 - RNA, 20 nt, Artificial Sequence
  HTT spacer sequence TTCN PAM
cuuugccauuagccuggaau

SEQ ID NO: 33722 - RNA, 20 nt, Artificial Sequence
  HTT spacer sequence TTCN PAM
aggcuaauggcaaagagaag

SEQ ID NO: 33723 - RNA, 20 nt, Artificial Sequence
  HTT spacer sequence TTCN PAM
uuugcaguucucccguugga

SEQ ID NO: 33724 - RNA, 20 nt, Artificial Sequence
  HTT spacer sequence TTCN PAM
cccguuggaugcccaguucc

SEQ ID NO: 33725 - RNA, 20 nt, Artificial Sequence
  HTT spacer sequence TTCN PAM
uagaugccauauguuuuucu

SEQ ID NO: 33726 - RNA, 20 nt, Artificial Sequence
  HTT spacer sequence TTCN PAM
aucgucuaguagcuuccuga

SEQ ID NO: 33727 - RNA, 20 nt, Artificial Sequence
  HTT spacer sequence TTCN PAM
ugagagaagaugaaugggag

SEQ ID NO: 33728 - RNA, 20 nt, Artificial Sequence
  HTT spacer sequence TTCN PAM
cucaggaagcuacuagacga

SEQ ID NO: 33729 - RNA, 20 nt, Artificial Sequence
  HTT spacer sequence TTCN PAM
ucuucucucaggaagcuacu

SEQ ID NO: 33730 - RNA, 20 nt, Artificial Sequence
  HTT spacer sequence TTCN PAM
cucccauucaucuucucuca

SEQ ID NO: 33731 - RNA, 20 nt, Artificial Sequence
  HTT spacer sequence TTCN PAM
uaaaaaugccauuuuuuuuc

SEQ ID NO: 33732 - RNA, 20 nt, Artificial Sequence
  HTT spacer sequence TTCN PAM
uguacacuuggcuggguaug

SEQ ID NO: 33733 - RNA, 20 nt, Artificial Sequence
  HTT spacer sequence TTCN PAM
gggguagaaaucauuuuccc

SEQ ID NO: 33734 - RNA, 20 nt, Artificial Sequence
  HTT spacer sequence TTCN PAM
accccagaacaccauaccca

SEQ ID NO: 33735 - RNA, 20 nt, Artificial Sequence
  HTT spacer sequence TTCN PAM
cucagaaaugcaaagucuuu

SEQ ID NO: 33736 - RNA, 20 nt, Artificial Sequence
  HTT spacer sequence TTCN PAM
gagggaaaaugauuucuacc

SEQ ID NO: 33737 - RNA, 20 nt, Artificial Sequence
  HTT spacer sequence TTCN PAM
uuaaccuaugaauguacuuu

SEQ ID NO: 33738 - RNA, 20 nt, Artificial Sequence
  HTT spacer sequence TTCN PAM
uagguuaaggaaucggguca

SEQ ID NO: 33739 - RNA, 20 nt, Artificial Sequence
  HTT spacer sequence TTCN PAM
uuggaagcuuuccauuuuug

SEQ ID NO: 33740 - RNA, 20 nt, Artificial Sequence
  HTT spacer sequence TTCN PAM
aaagaaaaguacauucauag

SEQ ID NO: 33741 - RNA, 20 nt, Artificial Sequence
  HTT spacer sequence TTCN PAM
auuuuuggggaggugaagug

SEQ ID NO: 33742 - RNA, 20 nt, Artificial Sequence
  HTT spacer sequence TTCN PAM
ccuccccaaaaauggaaagc

SEQ ID NO: 33743 - RNA, 20 nt, Artificial Sequence
  HTT spacer sequence TTCN PAM
aaauuaaaaggccuacuaag

SEQ ID NO: 33744 - RNA, 20 nt, Artificial Sequence
  HTT spacer sequence TTCN PAM
guucugggaaaauuuucuua

SEQ ID NO: 33745 - RNA, 20 nt, Artificial Sequence
  HTT spacer sequence TTCN PAM
gggaaaauuuucuuaacauu

SEQ ID NO: 33746 - RNA, 20 nt, Artificial Sequence
  HTT spacer sequence TTCN PAM
cagaacugaagggauguaag

SEQ ID NO: 33747 - RNA, 20 nt, Artificial Sequence
  HTT spacer sequence TTCN PAM
uaacauuucucugagaaguu

SEQ ID NO: 33748 - RNA, 20 nt, Artificial Sequence
  HTT spacer sequence TTCN PAM
cugagaaguucuugccuuuu

SEQ ID NO: 33749 - RNA, 20 nt, Artificial Sequence
  HTT spacer sequence TTCN PAM
cagagaaauguuaagaaaau

SEQ ID NO: 33750 - RNA, 20 nt, Artificial Sequence
  HTT spacer sequence TTCN PAM
ugccuuuuauuuucuguguu

SEQ ID NO: 33751 - RNA, 20 nt, Artificial Sequence
  HTT spacer sequence TTCN PAM
guguucucuccugaaauugg

SEQ ID NO: 33752 - RNA, 20 nt, Artificial Sequence
  HTT spacer sequence TTCN PAM
cuccugaaauugguuaguug

SEQ ID NO: 33753 - RNA, 20 nt, Artificial Sequence
  HTT spacer sequence TTCN PAM
ggagagaacacagaaaauaa

SEQ ID NO: 33754 - RNA, 20 nt, Artificial Sequence
  HTT spacer sequence TTCN PAM
uuucuuuuucugguacuuuu

SEQ ID NO: 33755 - RNA, 20 nt, Artificial Sequence
  HTT spacer sequence TTCN PAM
uuuucugguacuuuuuagau

SEQ ID NO: 33756 - RNA, 20 nt, Artificial Sequence
  HTT spacer sequence TTCN PAM
gguacuuuuuagauauccau

SEQ ID NO: 33757 - RNA, 20 nt, Artificial Sequence
  HTT spacer sequence TTCN PAM
auucauuguuauguuuuuaa

SEQ ID NO: 33758 - RNA, 20 nt, Artificial Sequence
  HTT spacer sequence TTCN PAM
uuguuauguuuuuaacuucu

SEQ ID NO: 33759 - RNA, 20 nt, Artificial Sequence
  HTT spacer sequence TTCN PAM
uucuuuucuuugucucuuga

SEQ ID NO: 33760 - RNA, 20 nt, Artificial Sequence
  HTT spacer sequence TTCN PAM
uuucuuugucucuugauggg

SEQ ID NO: 33761 - RNA, 20 nt, Artificial Sequence
  HTT spacer sequence TTCN PAM
uugucucuugauggggucuu

SEQ ID NO: 33762 - RNA, 20 nt, Artificial Sequence
  HTT spacer sequence TTCN PAM
ugggcucaagcagcuguucu

SEQ ID NO: 33763 - RNA, 20 nt, Artificial Sequence
  HTT spacer sequence TTCN PAM
gccucacccucccaaguagu

SEQ ID NO: 33764 - RNA, 20 nt, Artificial Sequence
  HTT spacer sequence TTCN PAM
uuacuuuuuuuuuuuuuuuu

SEQ ID NO: 33765 - RNA, 20 nt, Artificial Sequence
  HTT spacer sequence TTCN PAM
agcaguucuccugccucagc

SEQ ID NO: 33766 - RNA, 20 nt, Artificial Sequence
  HTT spacer sequence TTCN PAM
ccugccucagccucucaagu

SEQ ID NO: 33767 - RNA, 20 nt, Artificial Sequence
  HTT spacer sequence TTCN PAM
ccauguuggccaggcugguc

SEQ ID NO: 33768 - RNA, 20 nt, Artificial Sequence
  HTT spacer sequence TTCN PAM
agaccagccuggccaacaug

SEQ ID NO: 33769 - RNA, 20 nt, Artificial Sequence
  HTT spacer sequence TTCN PAM
gaggccaaggcaggcggauc

SEQ ID NO: 33770 - RNA, 20 nt, Artificial Sequence
  HTT spacer sequence TTCN PAM
ucuugagucagcuaguaucc

SEQ ID NO: 33771 - RNA, 20 nt, Artificial Sequence
  HTT spacer sequence TTCN PAM
agggauacuagcugacucaa

SEQ ID NO: 33772 - RNA, 20 nt, Artificial Sequence
  HTT spacer sequence TTCN PAM
uuccagggauacuagcugac

SEQ ID NO: 33773 - RNA, 20 nt, Artificial Sequence
  HTT spacer sequence TTCN PAM
ugcuuggaggcuauaagcuu

SEQ ID NO: 33774 - RNA, 20 nt, Artificial Sequence
  HTT spacer sequence TTCN PAM
aguccccgguugcaggauaa

SEQ ID NO: 33775 - RNA, 20 nt, Artificial Sequence
  HTT spacer sequence TTCN PAM
gugugcaucucacgucuguc

SEQ ID NO: 33776 - RNA, 20 nt, Artificial Sequence
  HTT spacer sequence TTCN PAM
ugggcugccuuggauuggag

SEQ ID NO: 33777 - RNA, 20 nt, Artificial Sequence
  HTT spacer sequence TTCN PAM
cuccaauccaaggcagccca

SEQ ID NO: 33778 - RNA, 20 nt, Artificial Sequence
  HTT spacer sequence TTCN PAM
cacccacucaccugaggucu

SEQ ID NO: 33779 - RNA, 20 nt, Artificial Sequence
  HTT spacer sequence TTCN PAM
cccucuccaucccuccacuu

SEQ ID NO: 33780 - RNA, 20 nt, Artificial Sequence
  HTT spacer sequence TTCN PAM
gauguauguggcgccuccaa

SEQ ID NO: 33781 - RNA, 20 nt, Artificial Sequence
  HTT spacer sequence TTCN PAM
uggcgucuguggcuucaaua

SEQ ID NO: 33782 - RNA, 20 nt, Artificial Sequence
  HTT spacer sequence TTCN PAM
auaagcuugcuuuuugcugg

SEQ ID NO: 33783 - RNA, 20 nt, Artificial Sequence
  HTT spacer sequence TTCN PAM
aaugcaagcuuugcugggga

SEQ ID NO: 33784 - RNA, 20 nt, Artificial Sequence
  HTT spacer sequence TTCN PAM
uccuacgggcuaacaaauca

SEQ ID NO: 33785 - RNA, 20 nt, Artificial Sequence
  HTT spacer sequence TTCN PAM
uacgggcuaacaaaucaguc

SEQ ID NO: 33786 - RNA, 20 nt, Artificial Sequence
  HTT spacer sequence TTCN PAM
gaaguuuuguugacacccgu

SEQ ID NO: 33787 - RNA, 20 nt, Artificial Sequence
  HTT spacer sequence TTCN PAM
gaagcuaaaaaguaacaaga

SEQ ID NO: 33788 - RNA, 20 nt, Artificial Sequence
  HTT spacer sequence TTCN PAM
guucuuucuguucguguaaa

SEQ ID NO: 33789 - RNA, 20 nt, Artificial Sequence
  HTT spacer sequence TTCN PAM
uucuguucguguaaauauau

SEQ ID NO: 33790 - RNA, 20 nt, Artificial Sequence
  HTT spacer sequence TTCN PAM
guucguguaaauauaugcuu

SEQ ID NO: 33791 - RNA, 20 nt, Artificial Sequence
  HTT spacer sequence TTCN PAM
uguaaauauaugcuuuauac

SEQ ID NO: 33792 - RNA, 20 nt, Artificial Sequence
  HTT spacer sequence TTCN PAM
uuacaugauuuuuguggggu

SEQ ID NO: 33793 - RNA, 20 nt, Artificial Sequence
  HTT spacer sequence TTCN PAM
ggguagcagagcuucacaag

SEQ ID NO: 33794 - RNA, 20 nt, Artificial Sequence
  HTT spacer sequence TTCN PAM
caaguucaauccagcguguu

SEQ ID NO: 33795 - RNA, 20 nt, Artificial Sequence
  HTT spacer sequence TTCN PAM
auccagcguguuggauuaga

SEQ ID NO: 33796 - RNA, 20 nt, Artificial Sequence
  HTT spacer sequence TTCN PAM
aauccaacacgcuggauuga

SEQ ID NO: 33797 - RNA, 20 nt, Artificial Sequence
  HTT spacer sequence TTCN PAM
uauucucaaaauuaccugcc

SEQ ID NO: 33798 - RNA, 20 nt, Artificial Sequence
  HTT spacer sequence TTCN PAM
caaaauuaccugccaaacac

SEQ ID NO: 33799 - RNA, 20 nt, Artificial Sequence
  HTT spacer sequence TTCN PAM
uuuuccugacaggaaaugua

SEQ ID NO: 33800 - RNA, 20 nt, Artificial Sequence
  HTT spacer sequence TTCN PAM
ugacaggaaauguacauacc

SEQ ID NO: 33801 - RNA, 20 nt, Artificial Sequence
  HTT spacer sequence TTCN PAM
ugucaggaaaaggaaaaaca

SEQ ID NO: 33802 - RNA, 20 nt, Artificial Sequence
  HTT spacer sequence TTCN PAM
guccuguaugguauguacau

SEQ ID NO: 33803 - RNA, 20 nt, Artificial Sequence
  HTT spacer sequence TTCN PAM
ccaagggauacacuaaugau

SEQ ID NO: 33804 - RNA, 20 nt, Artificial Sequence
  HTT spacer sequence TTCN PAM
cuuugugguuauucaccaag

SEQ ID NO: 33805 - RNA, 20 nt, Artificial Sequence
  HTT spacer sequence TTCN PAM
gucuugaccuggguggcggu

SEQ ID NO: 33806 - RNA, 20 nt, Artificial Sequence
  HTT spacer sequence TTCN PAM
gagugcuugguaauauucug

SEQ ID NO: 33807 - RNA, 20 nt, Artificial Sequence
  HTT spacer sequence TTCN PAM
cccgucacugcuccugccuu

SEQ ID NO: 33808 - RNA, 20 nt, Artificial Sequence
  HTT spacer sequence TTCN PAM
uccccaaggucaugacugcu

SEQ ID NO: 33809 - RNA, 20 nt, Artificial Sequence
  HTT spacer sequence TTCN PAM
aauuccagagucuguuuuua

SEQ ID NO: 33810 - RNA, 20 nt, Artificial Sequence
  HTT spacer sequence TTCN PAM
agagucuguuuuuaaauucu

SEQ ID NO: 33811 - RNA, 20 nt, Artificial Sequence
  HTT spacer sequence TTCN PAM
guguacauagaccauggauu

SEQ ID NO: 33812 - RNA, 20 nt, Artificial Sequence
  HTT spacer sequence TTCN PAM
uuuugucugguuuauuuugg

SEQ ID NO: 33813 - RNA, 20 nt, Artificial Sequence
  HTT spacer sequence TTCN PAM
ugagagucuucuauauuauc

SEQ ID NO: 33814 - RNA, 20 nt, Artificial Sequence
  HTT spacer sequence TTCN PAM
auauuaucguguguauuagu

SEQ ID NO: 33815 - RNA, 20 nt, Artificial Sequence
  HTT spacer sequence TTCN PAM
uguaguuuuaggagcuucau

SEQ ID NO: 33816 - RNA, 20 nt, Artificial Sequence
  HTT spacer sequence TTCN PAM
uagcauuccauuguagggau

SEQ ID NO: 33817 - RNA, 20 nt, Artificial Sequence
  HTT spacer sequence TTCN PAM
auuguagggauauaccacag

SEQ ID NO: 33818 - RNA, 20 nt, Artificial Sequence
  HTT spacer sequence TTCN PAM
uuguauuaucacuggguugu

SEQ ID NO: 33819 - RNA, 20 nt, Artificial Sequence
  HTT spacer sequence TTCN PAM
aguucuuggcuauugcgagc

SEQ ID NO: 33820 - RNA, 20 nt, Artificial Sequence
  HTT spacer sequence TTCN PAM
uggcuauugcgagcagugcu

SEQ ID NO: 33821 - RNA, 20 nt, Artificial Sequence
  HTT spacer sequence TTCN PAM
aucuugcacagcuagaggug

SEQ ID NO: 33822 - RNA, 20 nt, Artificial Sequence
  HTT spacer sequence TTCN PAM
acugcagcugagaugcacac

SEQ ID NO: 33823 - RNA, 20 nt, Artificial Sequence
  HTT spacer sequence TTCN PAM
uugagugcuuguaccagcuc

SEQ ID NO: 33824 - RNA, 20 nt, Artificial Sequence
  HTT spacer sequence TTCN PAM
aggagcucugguccucgcua

SEQ ID NO: 33825 - RNA, 20 nt, Artificial Sequence
  HTT spacer sequence TTCN PAM
aagugcuagcgaggaccaga

SEQ ID NO: 33826 - RNA, 20 nt, Artificial Sequence
  HTT spacer sequence TTCN PAM
ugauggguguuuucuggaau

SEQ ID NO: 33827 - RNA, 20 nt, Artificial Sequence
  HTT spacer sequence TTCN PAM
ggaaucacauuaugauuuua

SEQ ID NO: 33828 - RNA, 20 nt, Artificial Sequence
  HTT spacer sequence TTCN PAM
agaaaacacccaucaggaag

SEQ ID NO: 33829 - RNA, 20 nt, Artificial Sequence
  HTT spacer sequence TTCN PAM
auuccuuaaaguacccuugg

SEQ ID NO: 33830 - RNA, 20 nt, Artificial Sequence
  HTT spacer sequence TTCN PAM
uuaaaguacccuuggcucug

SEQ ID NO: 33831 - RNA, 20 nt, Artificial Sequence
  HTT spacer sequence TTCN PAM
gagccaaggguacuuuaagg

SEQ ID NO: 33832 - RNA, 20 nt, Artificial Sequence
  HTT spacer sequence TTCN PAM
ugcaucucuucccuuuugaa

SEQ ID NO: 33833 - RNA, 20 nt, Artificial Sequence
  HTT spacer sequence TTCN PAM
cuuuugaaguacucuuacag

SEQ ID NO: 33834 - RNA, 20 nt, Artificial Sequence
  HTT spacer sequence TTCN PAM
aaagggaagagaugcaugaa

SEQ ID NO: 33835 - RNA, 20 nt, Artificial Sequence
  HTT spacer sequence TTCN PAM
acacaugcacaacauaccug

SEQ ID NO: 33836 - RNA, 20 nt, Artificial Sequence
  HTT spacer sequence TTCN PAM
aaaauacaguaugccuccuc

SEQ ID NO: 33837 - RNA, 20 nt, Artificial Sequence
  HTT spacer sequence TTCN PAM
aacacagaggaggcauacug

SEQ ID NO: 33838 - RNA, 20 nt, Artificial Sequence
  HTT spacer sequence TTCN PAM
ccaagccagcuaacaggagg

SEQ ID NO: 33839 - RNA, 20 nt, Artificial Sequence
  HTT spacer sequence TTCN PAM
ugggauuguagagauuagac

SEQ ID NO: 33840 - RNA, 20 nt, Artificial Sequence
  HTT spacer sequence TTCN PAM
uuauuauuccaaacuauuua

SEQ ID NO: 33841 - RNA, 20 nt, Artificial Sequence
  HTT spacer sequence TTCN PAM
aaacuauuuaagcucaccgu

SEQ ID NO: 33842 - RNA, 20 nt, Artificial Sequence
  HTT spacer sequence TTCN PAM
uugagacagagucuugcucu

SEQ ID NO: 33843 - RNA, 20 nt, Artificial Sequence
  HTT spacer sequence TTCN PAM
agugauucuugugccucagc

SEQ ID NO: 33844 - RNA, 20 nt, Artificial Sequence
  HTT spacer sequence TTCN PAM
ugugccucagcuucucaagu

SEQ ID NO: 33845 - RNA, 20 nt, Artificial Sequence
  HTT spacer sequence TTCN PAM
caaguagcugagacugcagg

SEQ ID NO: 33846 - RNA, 20 nt, Artificial Sequence
  HTT spacer sequence TTCN PAM
ccauguuggccagguugguc

SEQ ID NO: 33847 - RNA, 20 nt, Artificial Sequence
  HTT spacer sequence TTCN PAM
ucagccucccaaagugcugg

SEQ ID NO: 33848 - RNA, 20 nt, Artificial Sequence
  HTT spacer sequence TTCN PAM
gccucccaaagugcugggau

SEQ ID NO: 33849 - RNA, 20 nt, Artificial Sequence
  HTT spacer sequence TTCN PAM
ugcagcuaaaaaaguuuguc

SEQ ID NO: 33850 - RNA, 20 nt, Artificial Sequence
  HTT spacer sequence TTCN PAM
acuuuguucuccagguguuu

SEQ ID NO: 33851 - RNA, 20 nt, Artificial Sequence
  HTT spacer sequence TTCN PAM
ccagguguuuucucagggag

SEQ ID NO: 33852 - RNA, 20 nt, Artificial Sequence
  HTT spacer sequence TTCN PAM
cagggagaaauuggaggcag

SEQ ID NO: 33853 - RNA, 20 nt, Artificial Sequence
  HTT spacer sequence TTCN PAM
cccugagaaaacaccuggag

SEQ ID NO: 33854 - RNA, 20 nt, Artificial Sequence
  HTT spacer sequence TTCN PAM
cuccuugccagccacaggac

SEQ ID NO: 33855 - RNA, 20 nt, Artificial Sequence
  HTT spacer sequence TTCN PAM
ucuagcgcugcuggguuagg

SEQ ID NO: 33856 - RNA, 20 nt, Artificial Sequence
  HTT spacer sequence TTCN PAM
gugugugugucuuuaauucc

SEQ ID NO: 33857 - RNA, 20 nt, Artificial Sequence
  HTT spacer sequence TTCN PAM
caccucuauauuucugugug

SEQ ID NO: 33858 - RNA, 20 nt, Artificial Sequence
  HTT spacer sequence TTCN PAM
cacuucacaccucuauauuu

SEQ ID NO: 33859 - RNA, 20 nt, Artificial Sequence
  HTT spacer sequence TTCN PAM
gggcucucagcucuaaaggc

SEQ ID NO: 33860 - RNA, 20 nt, Artificial Sequence
  HTT spacer sequence TTCN PAM
auagauguuaaauuaacuaa

SEQ ID NO: 33861 - RNA, 20 nt, Artificial Sequence
  HTT spacer sequence TTCN PAM
cauaagggauacuuuuaguu

SEQ ID NO: 33862 - RNA, 20 nt, Artificial Sequence
  HTT spacer sequence TTCN PAM
gcccauccccucguuuccca

SEQ ID NO: 33863 - RNA, 20 nt, Artificial Sequence
  HTT spacer sequence TTCN PAM
uuuaauucggcccauccccu

SEQ ID NO: 33864 - RNA, 20 nt, Artificial Sequence
  HTT spacer sequence TTCN PAM
uaagccacaaacaauagcau

SEQ ID NO: 33865 - RNA, 20 nt, Artificial Sequence
  HTT spacer sequence TTCN PAM
acccugggugggccaggugu

SEQ ID NO: 33866 - RNA, 20 nt, Artificial Sequence
  HTT spacer sequence TTCN PAM
uugcccucauuccugucaac

SEQ ID NO: 33867 - RNA, 20 nt, Artificial Sequence
  HTT spacer sequence TTCN PAM
ugucaacccacaaccuucca

SEQ ID NO: 33868 - RNA, 20 nt, Artificial Sequence
  HTT spacer sequence TTCN PAM
agugugggcauuagggccau

SEQ ID NO: 33869 - RNA, 20 nt, Artificial Sequence
  HTT spacer sequence TTCN PAM
uaauggcccuaaugcccaca

SEQ ID NO: 33870 - RNA, 20 nt, Artificial Sequence
  HTT spacer sequence TTCN PAM
gagauuuuguuuauggccag

SEQ ID NO: 33871 - RNA, 20 nt, Artificial Sequence
  HTT spacer sequence TTCN PAM
cugggaggcgauaagccucu

SEQ ID NO: 33872 - RNA, 20 nt, Artificial Sequence
  HTT spacer sequence TTCN PAM
cagaggcuuaucgccuccca

SEQ ID NO: 33873 - RNA, 20 nt, Artificial Sequence
  HTT spacer sequence TTCN PAM
uggcgugguuagcauagucu

SEQ ID NO: 33874 - RNA, 20 nt, Artificial Sequence
  HTT spacer sequence TTCN PAM
cuuucauggcgugguuagca

SEQ ID NO: 33875 - RNA, 20 nt, Artificial Sequence
  HTT spacer sequence TTCN PAM
gcaugcacugagcaagcacu

SEQ ID NO: 33876 - RNA, 20 nt, Artificial Sequence
  HTT spacer sequence TTCN PAM
aaucauuguucagcaugcac

SEQ ID NO: 33877 - RNA, 20 nt, Artificial Sequence
  HTT spacer sequence TTCN PAM
aaacuaugcucugagccaug

SEQ ID NO: 33878 - RNA, 20 nt, Artificial Sequence
  HTT spacer sequence TTCN PAM
cauuauucaaaacuaugcuc

SEQ ID NO: 33879 - RNA, 20 nt, Artificial Sequence
  HTT spacer sequence TTCN PAM
uaaguaacauagucaccaag

SEQ ID NO: 33880 - RNA, 20 nt, Artificial Sequence
  HTT spacer sequence TTCN PAM
auuuuaggauauuuuuauca

SEQ ID NO: 33881 - RNA, 20 nt, Artificial Sequence
  HTT spacer sequence TTCN PAM
ccuuuggauuguccuagagg

SEQ ID NO: 33882 - RNA, 20 nt, Artificial Sequence
  HTT spacer sequence TTCN PAM
caugggccucuaggacaauc

SEQ ID NO: 33883 - RNA, 20 nt, Artificial Sequence
  HTT spacer sequence TTCN PAM
cuaauuucuuaggagaacag

SEQ ID NO: 33884 - RNA, 20 nt, Artificial Sequence
  HTT spacer sequence TTCN PAM
uaggagaacaguuugugggu

SEQ ID NO: 33885 - RNA, 20 nt, Artificial Sequence
  HTT spacer sequence TTCN PAM
ccuaagaaauuagggaauac

SEQ ID NO: 33886 - RNA, 20 nt, Artificial Sequence
  HTT spacer sequence TTCN PAM
gaucgaagauguuccagucc

SEQ ID NO: 33887 - RNA, 20 nt, Artificial Sequence
  HTT spacer sequence TTCN PAM
aucggaaauaucugcaauuu

SEQ ID NO: 33888 - RNA, 20 nt, Artificial Sequence
  HTT spacer sequence TTCN PAM
aguccugagaacuucgugac

SEQ ID NO: 33889 - RNA, 20 nt, Artificial Sequence
  HTT spacer sequence TTCN PAM
caggacuggaacaucuucga

SEQ ID NO: 33890 - RNA, 20 nt, Artificial Sequence
  HTT spacer sequence TTCN PAM
ugacauuagcaggacuucua

SEQ ID NO: 33891 - RNA, 20 nt, Artificial Sequence
  HTT spacer sequence TTCN PAM
acaagccaucucuuagggug

SEQ ID NO: 33892 - RNA, 20 nt, Artificial Sequence
  HTT spacer sequence TTCN PAM
ccuuaacuuugucauuuguu

SEQ ID NO: 33893 - RNA, 20 nt, Artificial Sequence
  HTT spacer sequence TTCN PAM
agauacacucugcccacagu

SEQ ID NO: 33894 - RNA, 20 nt, Artificial Sequence
  HTT spacer sequence TTCN PAM
cucaggggacugcucagcau

SEQ ID NO: 33895 - RNA, 20 nt, Artificial Sequence
  HTT spacer sequence TTCN PAM
uuauaaccuucacucagggg

SEQ ID NO: 33896 - RNA, 20 nt, Artificial Sequence
  HTT spacer sequence TTCN PAM
guucagcuguaggaaaagcc

SEQ ID NO: 33897 - RNA, 20 nt, Artificial Sequence
  HTT spacer sequence TTCN PAM
gcuguaggaaaagccucaaa

SEQ ID NO: 33898 - RNA, 20 nt, Artificial Sequence
  HTT spacer sequence TTCN PAM
uacagcugaacugaaguacc

SEQ ID NO: 33899 - RNA, 20 nt, Artificial Sequence
  HTT spacer sequence TTCN PAM
ugcaaaguauaaacaguuug

SEQ ID NO: 33900 - RNA, 20 nt, Artificial Sequence
  HTT spacer sequence TTCN PAM
aauucuugcaaaguauaaac

SEQ ID NO: 33901 - RNA, 20 nt, Artificial Sequence
  HTT spacer sequence TTCN PAM
aauucacguuaaguuuuaug

SEQ ID NO: 33902 - RNA, 20 nt, Artificial Sequence
  HTT spacer sequence TTCN PAM
cguuaaguuuuauguaauac

SEQ ID NO: 33903 - RNA, 20 nt, Artificial Sequence
  HTT spacer sequence TTCN PAM
uaggagcuucaucuuuuauc

SEQ ID NO: 33904 - RNA, 20 nt, Artificial Sequence
  HTT spacer sequence TTCN PAM
ucuuuuaucuacuuggacuu

SEQ ID NO: 33905 - RNA, 20 nt, Artificial Sequence
  HTT spacer sequence TTCN PAM
guagguuuuguuaaaggccu

SEQ ID NO: 33906 - RNA, 20 nt, Artificial Sequence
  HTT spacer sequence TTCN PAM
uagcgaaccugaagucaagc

SEQ ID NO: 33907 - RNA, 20 nt, Artificial Sequence
  HTT spacer sequence TTCN PAM
cuaugaaggccuuuaacaaa

SEQ ID NO: 33908 - RNA, 20 nt, Artificial Sequence
  HTT spacer sequence TTCN PAM
gguucgcuaugaaggccuuu

SEQ ID NO: 33909 - RNA, 20 nt, Artificial Sequence
  HTT spacer sequence TTCN PAM
gcggacagcggcuggaucag

SEQ ID NO: 33910 - RNA, 20 nt, Artificial Sequence
  HTT spacer sequence TTCN PAM
ugagugcuggcagaugcuca

SEQ ID NO: 33911 - RNA, 20 nt, Artificial Sequence
  HTT spacer sequence TTCN PAM
auaguuggcuacuaaaugug

SEQ ID NO: 33912 - RNA, 20 nt, Artificial Sequence
  HTT spacer sequence TTCN PAM
acucauaugccuccaccuua

SEQ ID NO: 33913 - RNA, 20 nt, Artificial Sequence
  HTT spacer sequence TTCN PAM
aaggucuaucuugaguacau

SEQ ID NO: 33914 - RNA, 20 nt, Artificial Sequence
  HTT spacer sequence TTCN PAM
agaccaggcuauuuggcacu

SEQ ID NO: 33915 - RNA, 20 nt, Artificial Sequence
  HTT spacer sequence TTCN PAM
aucaaccagugccaaauagc

SEQ ID NO: 33916 - RNA, 20 nt, Artificial Sequence
  HTT spacer sequence TTCN PAM
cauucaaucaaccagugcca

SEQ ID NO: 33917 - RNA, 20 nt, Artificial Sequence
  HTT spacer sequence TTCN PAM
ugcggguucucuguagguca

SEQ ID NO: 33918 - RNA, 20 nt, Artificial Sequence
  HTT spacer sequence TTCN PAM
cuguaggucaguugacaguu

SEQ ID NO: 33919 - RNA, 20 nt, Artificial Sequence
  HTT spacer sequence TTCN PAM
ccuguuguuuggguaacugu

SEQ ID NO: 33920 - RNA, 20 nt, Artificial Sequence
  HTT spacer sequence TTCN PAM
acaguuacccaaacaacagg

SEQ ID NO: 33921 - RNA, 20 nt, Artificial Sequence
  HTT spacer sequence TTCN PAM
uuuccacaguuacccaaaca

SEQ ID NO: 33922 - RNA, 20 nt, Artificial Sequence
  HTT spacer sequence TTCN PAM
gcacuugccaguguucguuu

SEQ ID NO: 33923 - RNA, 20 nt, Artificial Sequence
  HTT spacer sequence TTCN PAM
uaucgcacguccacaugcuc

SEQ ID NO: 33924 - RNA, 20 nt, Artificial Sequence
  HTT spacer sequence TTCN PAM
aaggcagugaggcucucugg

SEQ ID NO: 33925 - RNA, 20 nt, Artificial Sequence
  HTT spacer sequence TTCN PAM
agagagccucacugccuuug

SEQ ID NO: 33926 - RNA, 20 nt, Artificial Sequence
  HTT spacer sequence TTCN PAM
cagugggccucauggcguac

SEQ ID NO: 33927 - RNA, 20 nt, Artificial Sequence
  HTT spacer sequence TTCN PAM
ugaucauguuugugccaucu

SEQ ID NO: 33928 - RNA, 20 nt, Artificial Sequence
  HTT spacer sequence TTCN PAM
uuuuuaacagauuaagccgg

SEQ ID NO: 33929 - RNA, 20 nt, Artificial Sequence
  HTT spacer sequence TTCN PAM
cggcuuaaucuguuaaaaaa

SEQ ID NO: 33930 - RNA, 20 nt, Artificial Sequence
  HTT spacer sequence TTCN PAM
acccccacaggcuuacucgu

SEQ ID NO: 33931 - RNA, 20 nt, Artificial Sequence
  HTT spacer sequence TTCN PAM
ugucgaggaugaacacucca

SEQ ID NO: 33932 - RNA, 20 nt, Artificial Sequence
  HTT spacer sequence TTCN PAM
uccucgacaggaacgaguaa

SEQ ID NO: 33933 - RNA, 20 nt, Artificial Sequence
  HTT spacer sequence TTCN PAM
uggcgugcugcucacccuga

SEQ ID NO: 33934 - RNA, 20 nt, Artificial Sequence
  HTT spacer sequence TTCN PAM
ggcuuguguccuugaccugc

SEQ ID NO: 33935 - RNA, 20 nt, Artificial Sequence
  HTT spacer sequence TTCN PAM
gagugacaaggaaagaaaug

SEQ ID NO: 33936 - RNA, 20 nt, Artificial Sequence
  HTT spacer sequence TTCN PAM
uugucacuccgaagcugccu

SEQ ID NO: 33937 - RNA, 20 nt, Artificial Sequence
  HTT spacer sequence TTCN PAM
uuccuugucacuccgaagcu

SEQ ID NO: 33938 - RNA, 20 nt, Artificial Sequence
  HTT spacer sequence TTCN PAM
auuucuuuccuugucacucc

SEQ ID NO: 33939 - RNA, 20 nt, Artificial Sequence
  HTT spacer sequence TTCN PAM
gcagagcagcuuguccaggu

SEQ ID NO: 33940 - RNA, 20 nt, Artificial Sequence
  HTT spacer sequence TTCN PAM
caugcagggccuagaguaaa

SEQ ID NO: 33941 - RNA, 20 nt, Artificial Sequence
  HTT spacer sequence TTCN PAM
aagaaccgauuaauuuggaa

SEQ ID NO: 33942 - RNA, 20 nt, Artificial Sequence
  HTT spacer sequence TTCN PAM
uugaaugucagucauucaca

SEQ ID NO: 33943 - RNA, 20 nt, Artificial Sequence
  HTT spacer sequence TTCN PAM
aaauuaaucgguucuuugaa

SEQ ID NO: 33944 - RNA, 20 nt, Artificial Sequence
  HTT spacer sequence TTCN PAM
cuuccaaauuaaucgguucu

SEQ ID NO: 33945 - RNA, 20 nt, Artificial Sequence
  HTT spacer sequence TTCN PAM
gccgcuucucuuccaaauua

SEQ ID NO: 33946 - RNA, 20 nt, Artificial Sequence
  HTT spacer sequence TTCN PAM
aacccuaggugcugaccucu

SEQ ID NO: 33947 - RNA, 20 nt, Artificial Sequence
  HTT spacer sequence TTCN PAM
cucuguaugucccugucacc

SEQ ID NO: 33948 - RNA, 20 nt, Artificial Sequence
  HTT spacer sequence TTCN PAM
aaaaccagaggucacgauau

SEQ ID NO: 33949 - RNA, 20 nt, Artificial Sequence
  HTT spacer sequence TTCN PAM
uccacccaguaaauacugau

SEQ ID NO: 33950 - RNA, 20 nt, Artificial Sequence
  HTT spacer sequence TTCN PAM
gcugcagcuucugccccgug

SEQ ID NO: 33951 - RNA, 20 nt, Artificial Sequence
  HTT spacer sequence TTCN PAM
gccccguggaggcuguggcc

SEQ ID NO: 33952 - RNA, 20 nt, Artificial Sequence
  HTT spacer sequence TTCN PAM
gacaccccaaacgaccacgu

SEQ ID NO: 33953 - RNA, 20 nt, Artificial Sequence
  HTT spacer sequence TTCN PAM
gacauuuuguuccgacaccc

SEQ ID NO: 33954 - RNA, 20 nt, Artificial Sequence
  HTT spacer sequence TTCN PAM
cuuuccaaugcagagaaacc

SEQ ID NO: 33955 - RNA, 20 nt, Artificial Sequence
  HTT spacer sequence TTCN PAM
aaugcagagaaaccuugcag

SEQ ID NO: 33956 - RNA, 20 nt, Artificial Sequence
  HTT spacer sequence TTCN PAM
cugcauuggaaagagaaguu

SEQ ID NO: 33957 - RNA, 20 nt, Artificial Sequence
  HTT spacer sequence TTCN PAM
aauguacugugauuggcagu

SEQ ID NO: 33958 - RNA, 20 nt, Artificial Sequence
  HTT spacer sequence TTCN PAM
guucuuuguagcacgcuuac

SEQ ID NO: 33959 - RNA, 20 nt, Artificial Sequence
  HTT spacer sequence TTCN PAM
uuguagcacgcuuacucagg

SEQ ID NO: 33960 - RNA, 20 nt, Artificial Sequence
  HTT spacer sequence TTCN PAM
cuaacuauguaaccaugcag

SEQ ID NO: 33961 - RNA, 20 nt, Artificial Sequence
  HTT spacer sequence TTCN PAM
aaaaauccaauugcuuaaaa

SEQ ID NO: 33962 - RNA, 20 nt, Artificial Sequence
  HTT spacer sequence TTCN PAM
uauccuacaaaacuuagcua

SEQ ID NO: 33963 - RNA, 20 nt, Artificial Sequence
  HTT spacer sequence TTCN PAM
uaauagaaucaugaauugaa

SEQ ID NO: 33964 - RNA, 20 nt, Artificial Sequence
  HTT spacer sequence TTCN PAM
auuaagaaucauuuuaagcc

SEQ ID NO: 33965 - RNA, 20 nt, Artificial Sequence
  HTT spacer sequence TTCN PAM
ugauucuauuaagaaucauu

SEQ ID NO: 33966 - RNA, 20 nt, Artificial Sequence
  HTT spacer sequence TTCN PAM
auucaugauucuauuaagaa

SEQ ID NO: 33967 - RNA, 20 nt, Artificial Sequence
  HTT spacer sequence TTCN PAM
aagcauuuuacaaacacuac

SEQ ID NO: 33968 - RNA, 20 nt, Artificial Sequence
  HTT spacer sequence TTCN PAM
uggcacauguuaaggccaug

SEQ ID NO: 33969 - RNA, 20 nt, Artificial Sequence
  HTT spacer sequence TTCN PAM
uaagaguccacuuuugcuca

SEQ ID NO: 33970 - RNA, 20 nt, Artificial Sequence
  HTT spacer sequence TTCN PAM
guuccaaccagcugcccuuu

SEQ ID NO: 33971 - RNA, 20 nt, Artificial Sequence
  HTT spacer sequence TTCN PAM
aaccagcugcccuuugguua

SEQ ID NO: 33972 - RNA, 20 nt, Artificial Sequence
  HTT spacer sequence TTCN PAM
gaauaaaagcagagucucau

SEQ ID NO: 33973 - RNA, 20 nt, Artificial Sequence
  HTT spacer sequence TTCN PAM
gaaaaauaaccaaagggcag

SEQ ID NO: 33974 - RNA, 20 nt, Artificial Sequence
  HTT spacer sequence TTCN PAM
uucacaaaaaacacugcuga

SEQ ID NO: 33975 - RNA, 20 nt, Artificial Sequence
  HTT spacer sequence TTCN PAM
caaaaaacacugcugagugu

SEQ ID NO: 33976 - RNA, 20 nt, Artificial Sequence
  HTT spacer sequence TTCN PAM
ucuuuaccuugccuuguuuu

SEQ ID NO: 33977 - RNA, 20 nt, Artificial Sequence
  HTT spacer sequence TTCN PAM
caauaaaaagcuagcuuaaa

SEQ ID NO: 33978 - RNA, 20 nt, Artificial Sequence
  HTT spacer sequence TTCN PAM
acacauacaaaaguaucaac

SEQ ID NO: 33979 - RNA, 20 nt, Artificial Sequence
  HTT spacer sequence TTCN PAM
uuuauaauccuacuucuccc

SEQ ID NO: 33980 - RNA, 20 nt, Artificial Sequence
  HTT spacer sequence TTCN PAM
cccuuuuuuuauuauuugaa

SEQ ID NO: 33981 - RNA, 20 nt, Artificial Sequence
  HTT spacer sequence TTCN PAM
aauaauaaaaaaagggagaa

SEQ ID NO: 33982 - RNA, 20 nt, Artificial Sequence
  HTT spacer sequence TTCN PAM
ucuauaaguauuucaguauc

SEQ ID NO: 33983 - RNA, 20 nt, Artificial Sequence
  HTT spacer sequence TTCN PAM
guaucucuauagaugaggac

SEQ ID NO: 33984 - RNA, 20 nt, Artificial Sequence
  HTT spacer sequence TTCN PAM
uuauuuuuaaaacuuuauuu

SEQ ID NO: 33985 - RNA, 20 nt, Artificial Sequence
  HTT spacer sequence TTCN PAM
ugccuguaaucccagaacuu

SEQ ID NO: 33986 - RNA, 20 nt, Artificial Sequence
  HTT spacer sequence TTCN PAM
gggauuacaggcaugaacac

SEQ ID NO: 33987 - RNA, 20 nt, Artificial Sequence
  HTT spacer sequence TTCN PAM
agugauccgcccagcuuggc

SEQ ID NO: 33988 - RNA, 20 nt, Artificial Sequence
  HTT spacer sequence TTCN PAM
cgggcuggucucaaacuccc

SEQ ID NO: 33989 - RNA, 20 nt, Artificial Sequence
  HTT spacer sequence TTCN PAM
ccauguuucccgggcugguc

SEQ ID NO: 33990 - RNA, 20 nt, Artificial Sequence
  HTT spacer sequence TTCN PAM
uuaagacaugggguuucgcc

SEQ ID NO: 33991 - RNA, 20 nt, Artificial Sequence
  HTT spacer sequence TTCN PAM
aggcucaugugacccuccca

SEQ ID NO: 33992 - RNA, 20 nt, Artificial Sequence
  HTT spacer sequence TTCN PAM
gucucaaaaaaacaaaacug

SEQ ID NO: 33993 - RNA, 20 nt, Artificial Sequence
  HTT spacer sequence TTCN PAM
ggucuaacaauggcacuguu

SEQ ID NO: 33994 - RNA, 20 nt, Artificial Sequence
  HTT spacer sequence TTCN PAM
uacaucaaauacccaccaac

SEQ ID NO: 33995 - RNA, 20 nt, Artificial Sequence
  HTT spacer sequence TTCN PAM
cucuacucuuuuggaaucag

SEQ ID NO: 33996 - RNA, 20 nt, Artificial Sequence
  HTT spacer sequence TTCN PAM
aaaagaguagagagaaaaau

SEQ ID NO: 33997 - RNA, 20 nt, Artificial Sequence
  HTT spacer sequence TTCN PAM
ucaaagagauuuacaauccu

SEQ ID NO: 33998 - RNA, 20 nt, Artificial Sequence
  HTT spacer sequence TTCN PAM
ccuccaucccaguuuuuuuc

SEQ ID NO: 33999 - RNA, 20 nt, Artificial Sequence
  HTT spacer sequence TTCN PAM
cuuagaguucauuuauugag

SEQ ID NO: 34000 - RNA, 20 nt, Artificial Sequence
  HTT spacer sequence TTCN PAM
uuuauugagaaaccagauug

SEQ ID NO: 34001 - RNA, 20 nt, Artificial Sequence
  HTT spacer sequence TTCN PAM
caauaaaugaacucuaaggg

SEQ ID NO: 34002 - RNA, 20 nt, Artificial Sequence
  HTT spacer sequence TTCN PAM
aaguuuuccuguggucugau

SEQ ID NO: 34003 - RNA, 20 nt, Artificial Sequence
  HTT spacer sequence TTCN PAM
uguggucugauauacugcuu

SEQ ID NO: 34004 - RNA, 20 nt, Artificial Sequence
  HTT spacer sequence TTCN PAM
aucuccacuguguaaauuaa

SEQ ID NO: 34005 - RNA, 20 nt, Artificial Sequence
  HTT spacer sequence TTCN PAM
cuucucuguauuuccuguaa

SEQ ID NO: 34006 - RNA, 20 nt, Artificial Sequence
  HTT spacer sequence TTCN PAM
cuguauuuccuguaaaucaa

SEQ ID NO: 34007 - RNA, 20 nt, Artificial Sequence
  HTT spacer sequence TTCN PAM
uguaaaucaauaauuggagg

SEQ ID NO: 34008 - RNA, 20 nt, Artificial Sequence
  HTT spacer sequence TTCN PAM
uccaauuauugauuuacagg

SEQ ID NO: 34009 - RNA, 20 nt, Artificial Sequence
  HTT spacer sequence TTCN PAM
uauauaauauuuuaagauaa

SEQ ID NO: 34010 - RNA, 20 nt, Artificial Sequence
  HTT spacer sequence TTCN PAM
auacuuuuuaaaagaguaca

SEQ ID NO: 34011 - RNA, 20 nt, Artificial Sequence
  HTT spacer sequence TTCN PAM
uaaaagcaucaguuaaaaaa

SEQ ID NO: 34012 - RNA, 20 nt, Artificial Sequence
  HTT spacer sequence TTCN PAM
caucagaccaaugaucucua

SEQ ID NO: 34013 - RNA, 20 nt, Artificial Sequence
  HTT spacer sequence TTCN PAM
ccaggccccaccaugugcac

SEQ ID NO: 34014 - RNA, 20 nt, Artificial Sequence
  HTT spacer sequence TTCN PAM
gucaugagccgucacuuaug

SEQ ID NO: 34015 - RNA, 20 nt, Artificial Sequence
  HTT spacer sequence TTCN PAM
acgugcccauaagugacggc

SEQ ID NO: 34016 - RNA, 20 nt, Artificial Sequence
  HTT spacer sequence TTCN PAM
cccaacucugugccggguca

SEQ ID NO: 34017 - RNA, 20 nt, Artificial Sequence
  HTT spacer sequence TTCN PAM
gucuauaaagcuccugucuu

SEQ ID NO: 34018 - RNA, 20 nt, Artificial Sequence
  HTT spacer sequence TTCN PAM
cuccugggacuuagcaaaga

SEQ ID NO: 34019 - RNA, 20 nt, Artificial Sequence
  HTT spacer sequence TTCN PAM
ggacccacccuugcucuguc

SEQ ID NO: 34020 - RNA, 20 nt, Artificial Sequence
  HTT spacer sequence TTCN PAM
cauagauuagcaagagugcu

SEQ ID NO: 34021 - RNA, 20 nt, Artificial Sequence
  HTT spacer sequence TTCN PAM
aacauuugugaacagaucga

SEQ ID NO: 34022 - RNA, 20 nt, Artificial Sequence
  HTT spacer sequence TTCN PAM
caaauguuagaaaccuccgu

SEQ ID NO: 34023 - RNA, 20 nt, Artificial Sequence
  HTT spacer sequence TTCN PAM
aucuguucacaaauguuaga

SEQ ID NO: 34024 - RNA, 20 nt, Artificial Sequence
  HTT spacer sequence TTCN PAM
aggauuacugcaaucccaau

SEQ ID NO: 34025 - RNA, 20 nt, Artificial Sequence
  HTT spacer sequence TTCN PAM
cccucuaucccuguccuucc

SEQ ID NO: 34026 - RNA, 20 nt, Artificial Sequence
  HTT spacer sequence TTCN PAM
ccuucacccucuaucccugu

SEQ ID NO: 34027 - RNA, 20 nt, Artificial Sequence
  HTT spacer sequence TTCN PAM
uaagaccuuucuccaaagua

SEQ ID NO: 34028 - RNA, 20 nt, Artificial Sequence
  HTT spacer sequence TTCN PAM
ccaaaguaaauaaaugaugu

SEQ ID NO: 34029 - RNA, 20 nt, Artificial Sequence
  HTT spacer sequence TTCN PAM
aaaaugugccacaucauuua

SEQ ID NO: 34030 - RNA, 20 nt, Artificial Sequence
  HTT spacer sequence TTCN PAM
aaacucuagauaugauuauc

SEQ ID NO: 34031 - RNA, 20 nt, Artificial Sequence
  HTT spacer sequence TTCN PAM
uuugacuaaaaacuguucuu

SEQ ID NO: 34032 - RNA, 20 nt, Artificial Sequence
  HTT spacer sequence TTCN PAM
uaauuaaauuaccaugagac

SEQ ID NO: 34033 - RNA, 20 nt, Artificial Sequence
  HTT spacer sequence TTCN PAM
auucagcaaauguaguuugg

SEQ ID NO: 34034 - RNA, 20 nt, Artificial Sequence
  HTT spacer sequence TTCN PAM
gcaaauguaguuuggcuaac

SEQ ID NO: 34035 - RNA, 20 nt, Artificial Sequence
  HTT spacer sequence TTCN PAM
aauuaaauaugguuagccaa

SEQ ID NO: 34036 - RNA, 20 nt, Artificial Sequence
  HTT spacer sequence TTCN PAM
ugcauaucuaaaauuaucaa

SEQ ID NO: 34037 - RNA, 20 nt, Artificial Sequence
  HTT spacer sequence TTCN PAM
augugugcuuuucgaaaaag

SEQ ID NO: 34038 - RNA, 20 nt, Artificial Sequence
  HTT spacer sequence TTCN PAM
aaaaaggaauaaauugaaaa

SEQ ID NO: 34039 - RNA, 20 nt, Artificial Sequence
  HTT spacer sequence TTCN PAM
aaaagcacacauggaaagca

SEQ ID NO: 34040 - RNA, 20 nt, Artificial Sequence
  HTT spacer sequence TTCN PAM
uuuuucgaaaagcacacaug

SEQ ID NO: 34041 - RNA, 20 nt, Artificial Sequence
  HTT spacer sequence TTCN PAM
auuuauuccuuuuucgaaaa

SEQ ID NO: 34042 - RNA, 20 nt, Artificial Sequence
  HTT spacer sequence TTCN PAM
ucuauuuuucaauuuauucc

SEQ ID NO: 34043 - RNA, 20 nt, Artificial Sequence
  HTT spacer sequence TTCN PAM
gggcuuccucuauuuuucaa

SEQ ID NO: 34044 - RNA, 20 nt, Artificial Sequence
  HTT spacer sequence TTCN PAM
uggauuucagggcuuccucu

SEQ ID NO: 34045 - RNA, 20 nt, Artificial Sequence
  HTT spacer sequence TTCN PAM
aggaugauugcuguuuggcg

SEQ ID NO: 34046 - RNA, 20 nt, Artificial Sequence
  HTT spacer sequence TTCN PAM
uauuagaaaccauucuucuu

SEQ ID NO: 34047 - RNA, 20 nt, Artificial Sequence
  HTT spacer sequence TTCN PAM
aauacgaacuacgcgccaaa

SEQ ID NO: 34048 - RNA, 20 nt, Artificial Sequence
  HTT spacer sequence TTCN PAM
ucuugaauaaauaguauguu

SEQ ID NO: 34049 - RNA, 20 nt, Artificial Sequence
  HTT spacer sequence TTCN PAM
ugaauaaauaguauguuuaa

SEQ ID NO: 34050 - RNA, 20 nt, Artificial Sequence
  HTT spacer sequence TTCN PAM
agaagaaugguuucuaauac

SEQ ID NO: 34051 - RNA, 20 nt, Artificial Sequence
  HTT spacer sequence TTCN PAM
uaaacauacuauuuauucaa

SEQ ID NO: 34052 - RNA, 20 nt, Artificial Sequence
  HTT spacer sequence TTCN PAM
cucugcccagcuucuuaaac

SEQ ID NO: 34053 - RNA, 20 nt, Artificial Sequence
  HTT spacer sequence TTCN PAM
cccuccuuguugauaauaua

SEQ ID NO: 34054 - RNA, 20 nt, Artificial Sequence
  HTT spacer sequence TTCN PAM
uuuauaaaucuugcugaccc

SEQ ID NO: 34055 - RNA, 20 nt, Artificial Sequence
  HTT spacer sequence TTCN PAM
uacuuggaucacaaauuucc

SEQ ID NO: 34056 - RNA, 20 nt, Artificial Sequence
  HTT spacer sequence TTCN PAM
gcaccuuauuuugcuucaua

SEQ ID NO: 34057 - RNA, 20 nt, Artificial Sequence
  HTT spacer sequence TTCN PAM
cuuacucuaaucuauuacuu

SEQ ID NO: 34058 - RNA, 20 nt, Artificial Sequence
  HTT spacer sequence TTCN PAM
cuuucaaaugacauggagua

SEQ ID NO: 34059 - RNA, 20 nt, Artificial Sequence
  HTT spacer sequence TTCN PAM
aaugacauggaguaguacug

SEQ ID NO: 34060 - RNA, 20 nt, Artificial Sequence
  HTT spacer sequence TTCN PAM
guacuacuccaugucauuug

SEQ ID NO: 34061 - RNA, 20 nt, Artificial Sequence
  HTT spacer sequence TTCN PAM
uucuuucugagucuagguua

SEQ ID NO: 34062 - RNA, 20 nt, Artificial Sequence
  HTT spacer sequence TTCN PAM
uucugagucuagguuauugu

SEQ ID NO: 34063 - RNA, 20 nt, Artificial Sequence
  HTT spacer sequence TTCN PAM
gagucuagguuauugugacu

SEQ ID NO: 34064 - RNA, 20 nt, Artificial Sequence
  HTT spacer sequence TTCN PAM
gaguccagucacaauaaccu

SEQ ID NO: 34065 - RNA, 20 nt, Artificial Sequence
  HTT spacer sequence TTCN PAM
uucugaguccagucacaaua

SEQ ID NO: 34066 - RNA, 20 nt, Artificial Sequence
  HTT spacer sequence TTCN PAM
uuauugcagugaauaacauu

SEQ ID NO: 34067 - RNA, 20 nt, Artificial Sequence
  HTT spacer sequence TTCN PAM
cugcaauaaugaaauauuuc

SEQ ID NO: 34068 - RNA, 20 nt, Artificial Sequence
  HTT spacer sequence TTCN PAM
caaauguuauucacugcaau

SEQ ID NO: 34069 - RNA, 20 nt, Artificial Sequence
  HTT spacer sequence TTCN PAM
uaaauuaugcagugaauaac

SEQ ID NO: 34070 - RNA, 20 nt, Artificial Sequence
  HTT spacer sequence TTCN PAM
cugcauaauuuaugaacaau

SEQ ID NO: 34071 - RNA, 20 nt, Artificial Sequence
  HTT spacer sequence TTCN PAM
uaaauguuauucacugcaua

SEQ ID NO: 34072 - RNA, 20 nt, Artificial Sequence
  HTT spacer sequence TTCN PAM
aggcagagaacauuaaaugu

SEQ ID NO: 34073 - RNA, 20 nt, Artificial Sequence
  HTT spacer sequence TTCN PAM
cugccuagaaguugagccaa

SEQ ID NO: 34074 - RNA, 20 nt, Artificial Sequence
  HTT spacer sequence TTCN PAM
auuuacaugcuccuagguaa

SEQ ID NO: 34075 - RNA, 20 nt, Artificial Sequence
  HTT spacer sequence TTCN PAM
uacuauggagauuuccauuu

SEQ ID NO: 34076 - RNA, 20 nt, Artificial Sequence
  HTT spacer sequence TTCN PAM
guuagcaacagcacugcuuu

SEQ ID NO: 34077 - RNA, 20 nt, Artificial Sequence
  HTT spacer sequence TTCN PAM
ccucaucugcccccuccuaa

SEQ ID NO: 34078 - RNA, 20 nt, Artificial Sequence
  HTT spacer sequence TTCN PAM
uucaccucaucugcccccuc

SEQ ID NO: 34079 - RNA, 20 nt, Artificial Sequence
  HTT spacer sequence TTCN PAM
uuauuacauugagaggagcc

SEQ ID NO: 34080 - RNA, 20 nt, Artificial Sequence
  HTT spacer sequence TTCN PAM
uuguucaaaauggauggcuu

SEQ ID NO: 34081 - RNA, 20 nt, Artificial Sequence
  HTT spacer sequence TTCN PAM
aaauggauggcuuaagaagu

SEQ ID NO: 34082 - RNA, 20 nt, Artificial Sequence
  HTT spacer sequence TTCN PAM
uaagccauccauuuugaaca

SEQ ID NO: 34083 - RNA, 20 nt, Artificial Sequence
  HTT spacer sequence TTCN PAM
gucuugcaggccaucccaag

SEQ ID NO: 34084 - RNA, 20 nt, Artificial Sequence
  HTT spacer sequence TTCN PAM
ugcuacaaagguaguguuga

SEQ ID NO: 34085 - RNA, 20 nt, Artificial Sequence
  HTT spacer sequence TTCN PAM
ggugaaacuuuagguacaaa

SEQ ID NO: 34086 - RNA, 20 nt, Artificial Sequence
  HTT spacer sequence TTCN PAM
ccggaacagagccacauuua

SEQ ID NO: 34087 - RNA, 20 nt, Artificial Sequence
  HTT spacer sequence TTCN PAM
gggguauagaaguuaccauc

SEQ ID NO: 34088 - RNA, 20 nt, Artificial Sequence
  HTT spacer sequence TTCN PAM
auaccccugaaucccagguc

SEQ ID NO: 34089 - RNA, 20 nt, Artificial Sequence
  HTT spacer sequence TTCN PAM
gaugguaacuucuauacccc

SEQ ID NO: 34090 - RNA, 20 nt, Artificial Sequence
  HTT spacer sequence TTCN PAM
acacugucugauuuugaaaa

SEQ ID NO: 34091 - RNA, 20 nt, Artificial Sequence
  HTT spacer sequence TTCN PAM
aaaucagacaguguagaaga

SEQ ID NO: 34092 - RNA, 20 nt, Artificial Sequence
  HTT spacer sequence TTCN PAM
uuuuuucaaaaucagacagu

SEQ ID NO: 34093 - RNA, 20 nt, Artificial Sequence
  HTT spacer sequence TTCN PAM
guauuuuuauuugcuauuug

SEQ ID NO: 34094 - RNA, 20 nt, Artificial Sequence
  HTT spacer sequence TTCN PAM
cugguauucuguauuuuuau

SEQ ID NO: 34095 - RNA, 20 nt, Artificial Sequence
  HTT spacer sequence TTCN PAM
aauuucacugguauucugua

SEQ ID NO: 34096 - RNA, 20 nt, Artificial Sequence
  HTT spacer sequence TTCN PAM
gauacauuaugaguaauuuu

SEQ ID NO: 34097 - RNA, 20 nt, Artificial Sequence
  HTT spacer sequence TTCN PAM
aaaucaugugggacauacuu

SEQ ID NO: 34098 - RNA, 20 nt, Artificial Sequence
  HTT spacer sequence TTCN PAM
cuuuaauuacaguugccaga

SEQ ID NO: 34099 - RNA, 20 nt, Artificial Sequence
  HTT spacer sequence TTCN PAM
uuuucccuuuaauuacaguu

SEQ ID NO: 34100 - RNA, 20 nt, Artificial Sequence
  HTT spacer sequence TTCN PAM
uuauguucauauaaugugau

SEQ ID NO: 34101 - RNA, 20 nt, Artificial Sequence
  HTT spacer sequence TTCN PAM
uauaaugugauauagcaggg

SEQ ID NO: 34102 - RNA, 20 nt, Artificial Sequence
  HTT spacer sequence TTCN PAM
uaacaggccauggaccaaua

SEQ ID NO: 34103 - RNA, 20 nt, Artificial Sequence
  HTT spacer sequence TTCN PAM
ugcugggcagccugguuccu

SEQ ID NO: 34104 - RNA, 20 nt, Artificial Sequence
  HTT spacer sequence TTCN PAM
caccugagcaccgccuccug

SEQ ID NO: 34105 - RNA, 20 nt, Artificial Sequence
  HTT spacer sequence TTCN PAM
cauaggagugcaaacccuau

SEQ ID NO: 34106 - RNA, 20 nt, Artificial Sequence
  HTT spacer sequence TTCN PAM
caauaggguuugcacuccua

SEQ ID NO: 34107 - RNA, 20 nt, Artificial Sequence
  HTT spacer sequence TTCN PAM
cauaaggagcgcacaaccua

SEQ ID NO: 34108 - RNA, 20 nt, Artificial Sequence
  HTT spacer sequence TTCN PAM
accucagaucaucaggcauu

SEQ ID NO: 34109 - RNA, 20 nt, Artificial Sequence
  HTT spacer sequence TTCN PAM
agacgagacuguuccaccuc

SEQ ID NO: 34110 - RNA, 20 nt, Artificial Sequence
  HTT spacer sequence TTCN PAM
acagggccaggggaugguuu

SEQ ID NO: 34111 - RNA, 20 nt, Artificial Sequence
  HTT spacer sequence TTCN PAM
ugggagacaauuuuuccaca

SEQ ID NO: 34112 - RNA, 20 nt, Artificial Sequence
  HTT spacer sequence TTCN PAM
ggcaccagagacugguuuca

SEQ ID NO: 34113 - RNA, 20 nt, Artificial Sequence
  HTT spacer sequence TTCN PAM
caguggcacucauaauagug

SEQ ID NO: 34114 - RNA, 20 nt, Artificial Sequence
  HTT spacer sequence TTCN PAM
cuuuccuagucaccaguuuu

SEQ ID NO: 34115 - RNA, 20 nt, Artificial Sequence
  HTT spacer sequence TTCN PAM
uagucaccaguuuugggaaa

SEQ ID NO: 34116 - RNA, 20 nt, Artificial Sequence
  HTT spacer sequence TTCN PAM
caaaacuggugacuaggaaa

SEQ ID NO: 34117 - RNA, 20 nt, Artificial Sequence
  HTT spacer sequence TTCN PAM
uucucaugcugcuccucuag

SEQ ID NO: 34118 - RNA, 20 nt, Artificial Sequence
  HTT spacer sequence TTCN PAM
caugcugcuccucuagugca

SEQ ID NO: 34119 - RNA, 20 nt, Artificial Sequence
  HTT spacer sequence TTCN PAM
uuaaaaauaaauggagcacu

SEQ ID NO: 34120 - RNA, 20 nt, Artificial Sequence
  HTT spacer sequence TTCN PAM
caugauuuuuuguuauauua

SEQ ID NO: 34121 - RNA, 20 nt, Artificial Sequence
  HTT spacer sequence TTCN PAM
aaauucccaugauuuuuugu

SEQ ID NO: 34122 - RNA, 20 nt, Artificial Sequence
  HTT spacer sequence TTCN PAM
auguuguuuucuaaauuccc

SEQ ID NO: 34123 - RNA, 20 nt, Artificial Sequence
  HTT spacer sequence TTCN PAM
accaaugugaucauuagcuu

SEQ ID NO: 34124 - RNA, 20 nt, Artificial Sequence
  HTT spacer sequence TTCN PAM
cuaucacuuccaccaaugug

SEQ ID NO: 34125 - RNA, 20 nt, Artificial Sequence
  HTT spacer sequence TTCN PAM
cccccuaaauauuucccuau

SEQ ID NO: 34126 - RNA, 20 nt, Artificial Sequence
  HTT spacer sequence TTCN PAM
uugacaaaguuuauaccuua

SEQ ID NO: 34127 - RNA, 20 nt, Artificial Sequence
  HTT spacer sequence TTCN PAM
cuuuuuuguuguuuuuaaua

SEQ ID NO: 34128 - RNA, 20 nt, Artificial Sequence
  HTT spacer sequence TTCN PAM
ggucagaguuuauaaaaugc

SEQ ID NO: 34129 - RNA, 20 nt, Artificial Sequence
  HTT spacer sequence TTCN PAM
cuguuucuagguuuaugaac

SEQ ID NO: 34130 - RNA, 20 nt, Artificial Sequence
  HTT spacer sequence TTCN PAM
agguuuaugaacugacguua

SEQ ID NO: 34131 - RNA, 20 nt, Artificial Sequence
  HTT spacer sequence TTCN PAM
uaaaccuagaaacagagaaa

SEQ ID NO: 34132 - RNA, 20 nt, Artificial Sequence
  HTT spacer sequence TTCN PAM
gaacgccuccacccgagcuu

SEQ ID NO: 34133 - RNA, 20 nt, Artificial Sequence
  HTT spacer sequence TTCN PAM
gaagagcugcugcaacagcu

SEQ ID NO: 34134 - RNA, 20 nt, Artificial Sequence
  HTT spacer sequence TTCN PAM
gcaaacccugaccgcagucg

SEQ ID NO: 34135 - RNA, 20 nt, Artificial Sequence
  HTT spacer sequence TTCN PAM
gccaccagacuccuccuuag

SEQ ID NO: 34136 - RNA, 20 nt, Artificial Sequence
  HTT spacer sequence TTCN PAM
acaauacucccacuacggcu

SEQ ID NO: 34137 - RNA, 20 nt, Artificial Sequence
  HTT spacer sequence TTCN PAM
aucuuccuugccaaaacuua

SEQ ID NO: 34138 - RNA, 20 nt, Artificial Sequence
  HTT spacer sequence TTCN PAM
uugccaaaacuuauaauaca

SEQ ID NO: 34139 - RNA, 20 nt, Artificial Sequence
  HTT spacer sequence TTCN PAM
ucuuuauuuuauaaauaggg

SEQ ID NO: 34140 - RNA, 20 nt, Artificial Sequence
  HTT spacer sequence TTCN PAM
gcacuuuggaaggaucgcuu

SEQ ID NO: 34141 - RNA, 20 nt, Artificial Sequence
  HTT spacer sequence TTCN PAM
aaagugcugaaauuacaggc

SEQ ID NO: 34142 - RNA, 20 nt, Artificial Sequence
  HTT spacer sequence TTCN PAM
gcccaggaguuugagacaac

SEQ ID NO: 34143 - RNA, 20 nt, Artificial Sequence
  HTT spacer sequence TTCN PAM
cugcagccucaaccucuugg

SEQ ID NO: 34144 - RNA, 20 nt, Artificial Sequence
  HTT spacer sequence TTCN PAM
cuuauuuuauuuuuaaauuu

SEQ ID NO: 34145 - RNA, 20 nt, Artificial Sequence
  HTT spacer sequence TTCN PAM
uuucucugccuuggcugccu

SEQ ID NO: 34146 - RNA, 20 nt, Artificial Sequence
  HTT spacer sequence TTCN PAM
cugccuuggcugccuccugu

SEQ ID NO: 34147 - RNA, 20 nt, Artificial Sequence
  HTT spacer sequence TTCN PAM
cagcaccuaaaaugccacag

SEQ ID NO: 34148 - RNA, 20 nt, Artificial Sequence
  HTT spacer sequence TTCN PAM
uuucucagcaccuaaaaugc

SEQ ID NO: 34149 - RNA, 20 nt, Artificial Sequence
  HTT spacer sequence TTCN PAM
cuacuguuuucauuucucag

SEQ ID NO: 34150 - RNA, 20 nt, Artificial Sequence
  HTT spacer sequence TTCN PAM
aggauccucauguuaauuug

SEQ ID NO: 34151 - RNA, 20 nt, Artificial Sequence
  HTT spacer sequence TTCN PAM
ggcaaauuaacaugaggauc

SEQ ID NO: 34152 - RNA, 20 nt, Artificial Sequence
  HTT spacer sequence TTCN PAM
agucgucagagggaucugag

SEQ ID NO: 34153 - RNA, 20 nt, Artificial Sequence
  HTT spacer sequence TTCN PAM
uuccuggccugacuugagaa

SEQ ID NO: 34154 - RNA, 20 nt, Artificial Sequence
  HTT spacer sequence TTCN PAM
uggccugacuugagaaaauc

SEQ ID NO: 34155 - RNA, 20 nt, Artificial Sequence
  HTT spacer sequence TTCN PAM
caagucaggccaggaaggaa

SEQ ID NO: 34156 - RNA, 20 nt, Artificial Sequence
  HTT spacer sequence TTCN PAM
gcugacuccggccucuccua

SEQ ID NO: 34157 - RNA, 20 nt, Artificial Sequence
  HTT spacer sequence TTCN PAM
cucuaauguggaggcuguga

SEQ ID NO: 34158 - RNA, 20 nt, Artificial Sequence
  HTT spacer sequence TTCN PAM
gucagauucucucuaaugug

SEQ ID NO: 34159 - RNA, 20 nt, Artificial Sequence
  HTT spacer sequence TTCN PAM
cacgaggcagcaguaagacu

SEQ ID NO: 34160 - RNA, 20 nt, Artificial Sequence
  HTT spacer sequence TTCN PAM
ggcaaacauuuauguucaca

SEQ ID NO: 34161 - RNA, 20 nt, Artificial Sequence
  HTT spacer sequence TTCN PAM
ugcucaugguucuggcaaac

SEQ ID NO: 34162 - RNA, 20 nt, Artificial Sequence
  HTT spacer sequence TTCN PAM
uguccuuuacacggaagaau

SEQ ID NO: 34163 - RNA, 20 nt, Artificial Sequence
  HTT spacer sequence TTCN PAM
guguaaaggacaggaaacaa

SEQ ID NO: 34164 - RNA, 20 nt, Artificial Sequence
  HTT spacer sequence TTCN PAM
uccguguaaaggacaggaaa

SEQ ID NO: 34165 - RNA, 20 nt, Artificial Sequence
  HTT spacer sequence TTCN PAM
guauggaaugcgugccuuac

SEQ ID NO: 34166 - RNA, 20 nt, Artificial Sequence
  HTT spacer sequence TTCN PAM
auacagaaaaaaauucuucc

SEQ ID NO: 34167 - RNA, 20 nt, Artificial Sequence
  HTT spacer sequence TTCN PAM
acucauuauuuguaaggcac

SEQ ID NO: 34168 - RNA, 20 nt, Artificial Sequence
  HTT spacer sequence TTCN PAM
uuagcgauggguauuuccac

SEQ ID NO: 34169 - RNA, 20 nt, Artificial Sequence
  HTT spacer sequence TTCN PAM
aauacuuuuaauuuggcuuu

SEQ ID NO: 34170 - RNA, 20 nt, Artificial Sequence
  HTT spacer sequence TTCN PAM
uaggucauaucuuuagaacu

SEQ ID NO: 34171 - RNA, 20 nt, Artificial Sequence
  HTT spacer sequence TTCN PAM
aaagauaugaccuaagaaau

SEQ ID NO: 34172 - RNA, 20 nt, Artificial Sequence
  HTT spacer sequence TTCN PAM
aauauauaguucuaaagaua

SEQ ID NO: 34173 - RNA, 20 nt, Artificial Sequence
  HTT spacer sequence TTCN PAM
uauugaaauuaaaauguuga

SEQ ID NO: 34174 - RNA, 20 nt, Artificial Sequence
  HTT spacer sequence TTCN PAM
auaugaaaauuacauuaaca

SEQ ID NO: 34175 - RNA, 20 nt, Artificial Sequence
  HTT spacer sequence TTCN PAM
acauuuuaauuucaauauga

SEQ ID NO: 34176 - RNA, 20 nt, Artificial Sequence
  HTT spacer sequence TTCN PAM
uguggaaaaacguucacauu

SEQ ID NO: 34177 - RNA, 20 nt, Artificial Sequence
  HTT spacer sequence TTCN PAM
acaggaaacacuuaacaucg

SEQ ID NO: 34178 - RNA, 20 nt, Artificial Sequence
  HTT spacer sequence TTCN PAM
cauuuucucuaguuuuaaag

SEQ ID NO: 34179 - RNA, 20 nt, Artificial Sequence
  HTT spacer sequence TTCN PAM
cuaguuuuaaaguugaauca

SEQ ID NO: 34180 - RNA, 20 nt, Artificial Sequence
  HTT spacer sequence TTCN PAM
acuuuaaaacuagagaaaau

SEQ ID NO: 34181 - RNA, 20 nt, Artificial Sequence
  HTT spacer sequence TTCN PAM
aacagcuugauucaacuuua

SEQ ID NO: 34182 - RNA, 20 nt, Artificial Sequence
  HTT spacer sequence TTCN PAM
cauuucuucuagauuuuauc

SEQ ID NO: 34183 - RNA, 20 nt, Artificial Sequence
  HTT spacer sequence TTCN PAM
ucuagauuuuaucagcuugu

SEQ ID NO: 34184 - RNA, 20 nt, Artificial Sequence
  HTT spacer sequence TTCN PAM
agauuuuaucagcuuguuac

SEQ ID NO: 34185 - RNA, 20 nt, Artificial Sequence
  HTT spacer sequence TTCN PAM
gugauuugcagcuggagggg

SEQ ID NO: 34186 - RNA, 20 nt, Artificial Sequence
  HTT spacer sequence TTCN PAM
ucaugcagcccuguccuuuc

SEQ ID NO: 34187 - RNA, 20 nt, Artificial Sequence
  HTT spacer sequence TTCN PAM
agaaaacaaaaaggugauua

SEQ ID NO: 34188 - RNA, 20 nt, Artificial Sequence
  HTT spacer sequence TTCN PAM
ugaaaggacagggcugcaug

SEQ ID NO: 34189 - RNA, 20 nt, Artificial Sequence
  HTT spacer sequence TTCN PAM
gaaaucagagucuuguguug

SEQ ID NO: 34190 - RNA, 20 nt, Artificial Sequence
  HTT spacer sequence TTCN PAM
gaaauaaucaccuuuuuguu

SEQ ID NO: 34191 - RNA, 20 nt, Artificial Sequence
  HTT spacer sequence TTCN PAM
acacaagacucugauuucug

SEQ ID NO: 34192 - RNA, 20 nt, Artificial Sequence
  HTT spacer sequence TTCN PAM
uguauuucuguaauguaaug

SEQ ID NO: 34193 - RNA, 20 nt, Artificial Sequence
  HTT spacer sequence TTCN PAM
guaauguaauguaucuugua

SEQ ID NO: 34194 - RNA, 20 nt, Artificial Sequence
  HTT spacer sequence TTCN PAM
uguaauacuguauuggacuc

SEQ ID NO: 34195 - RNA, 20 nt, Artificial Sequence
  HTT spacer sequence TTCN PAM
cagaugagugauuauaugug

SEQ ID NO: 34196 - RNA, 20 nt, Artificial Sequence
  HTT spacer sequence TTCN PAM
cacauauaaucacucaucug

SEQ ID NO: 34197 - RNA, 20 nt, Artificial Sequence
  HTT spacer sequence TTCN PAM
agcaacauucacacauauaa

SEQ ID NO: 34198 - RNA, 20 nt, Artificial Sequence
  HTT spacer sequence TTCN PAM
ggccugguuaucagauucca

SEQ ID NO: 34199 - RNA, 20 nt, Artificial Sequence
  HTT spacer sequence TTCN PAM
uaucagaauugcuuugucau

SEQ ID NO: 34200 - RNA, 20 nt, Artificial Sequence
  HTT spacer sequence TTCN PAM
gauaugaaaguaauuuuuaa

SEQ ID NO: 34201 - RNA, 20 nt, Artificial Sequence
  HTT spacer sequence TTCN PAM
aaauuuaugacaaagcaauu

SEQ ID NO: 34202 - RNA, 20 nt, Artificial Sequence
  HTT spacer sequence TTCN PAM
aauguucggggucagcagac

SEQ ID NO: 34203 - RNA, 20 nt, Artificial Sequence
  HTT spacer sequence TTCN PAM
gggucagcagacuuuuuuug

SEQ ID NO: 34204 - RNA, 20 nt, Artificial Sequence
  HTT spacer sequence TTCN PAM
gcucugcccugugacaggaa

SEQ ID NO: 34205 - RNA, 20 nt, Artificial Sequence
  HTT spacer sequence TTCN PAM
ugucacagggcagagcugaa

SEQ ID NO: 34206 - RNA, 20 nt, Artificial Sequence
  HTT spacer sequence TTCN PAM
aguagaacuuuacuuacaga

SEQ ID NO: 34207 - RNA, 20 nt, Artificial Sequence
  HTT spacer sequence TTCN PAM
acuggaacauagcuggccag

SEQ ID NO: 34208 - RNA, 20 nt, Artificial Sequence
  HTT spacer sequence TTCN PAM
guaaguaaaguucuacugga

SEQ ID NO: 34209 - RNA, 20 nt, Artificial Sequence
  HTT spacer sequence TTCN PAM
cuaaggcagguauuggcaaa

SEQ ID NO: 34210 - RNA, 20 nt, Artificial Sequence
  HTT spacer sequence TTCN PAM
caguaaauuuuauuuaguau

SEQ ID NO: 34211 - RNA, 20 nt, Artificial Sequence
  HTT spacer sequence TTCN PAM
ugacuaauacuaaauaaaau

SEQ ID NO: 34212 - RNA, 20 nt, Artificial Sequence
  HTT spacer sequence TTCN PAM
uuuccagccuggucaacaua

SEQ ID NO: 34213 - RNA, 20 nt, Artificial Sequence
  HTT spacer sequence TTCN PAM
agccuggucaacauagugag

SEQ ID NO: 34214 - RNA, 20 nt, Artificial Sequence
  HTT spacer sequence TTCN PAM
guugccuaggcuggagugca

SEQ ID NO: 34215 - RNA, 20 nt, Artificial Sequence
  HTT spacer sequence TTCN PAM
uuuguuggguuauuuuaauu

SEQ ID NO: 34216 - RNA, 20 nt, Artificial Sequence
  HTT spacer sequence TTCN PAM
gccauauuuaacuuuguaca

SEQ ID NO: 34217 - RNA, 20 nt, Artificial Sequence
  HTT spacer sequence TTCN PAM
gauauguacaaaguuaaaua

SEQ ID NO: 34218 - RNA, 20 nt, Artificial Sequence
  HTT spacer sequence TTCN PAM
gauaaaacuuaacuuuuauu

SEQ ID NO: 34219 - RNA, 20 nt, Artificial Sequence
  HTT spacer sequence TTCN PAM
uuuccaguguggguuugcau

SEQ ID NO: 34220 - RNA, 20 nt, Artificial Sequence
  HTT spacer sequence TTCN PAM
aguguggguuugcauaggaa

SEQ ID NO: 34221 - RNA, 20 nt, Artificial Sequence
  HTT spacer sequence TTCN PAM
uaugcaaacccacacuggaa

SEQ ID NO: 34222 - RNA, 20 nt, Artificial Sequence
  HTT spacer sequence TTCN PAM
uuuccuaugcaaacccacac

SEQ ID NO: 34223 - RNA, 20 nt, Artificial Sequence
  HTT spacer sequence TTCN PAM
auuuugaaaucuuaaaagac

SEQ ID NO: 34224 - RNA, 20 nt, Artificial Sequence
  HTT spacer sequence TTCN PAM
aaauagaaagugacagcaau

SEQ ID NO: 34225 - RNA, 20 nt, Artificial Sequence
  HTT spacer sequence TTCN PAM
uguuaagaucccauuuaaua

SEQ ID NO: 34226 - RNA, 20 nt, Artificial Sequence
  HTT spacer sequence TTCN PAM
agccuucauugaauuaagua

SEQ ID NO: 34227 - RNA, 20 nt, Artificial Sequence
  HTT spacer sequence TTCN PAM
uugaauuaaguaaacauuuc

SEQ ID NO: 34228 - RNA, 20 nt, Artificial Sequence
  HTT spacer sequence TTCN PAM
augaaggcuagaaugcuauu

SEQ ID NO: 34229 - RNA, 20 nt, Artificial Sequence
  HTT spacer sequence TTCN PAM
uaagagaacuuggaaucuau

SEQ ID NO: 34230 - RNA, 20 nt, Artificial Sequence
  HTT spacer sequence TTCN PAM
cuuaagaaauguuuacuuaa

SEQ ID NO: 34231 - RNA, 20 nt, Artificial Sequence
  HTT spacer sequence TTCN PAM
aaguucucuuaagaaauguu

SEQ ID NO: 34232 - RNA, 20 nt, Artificial Sequence
  HTT spacer sequence TTCN PAM
cuaaaaucucaaacuugauu

SEQ ID NO: 34233 - RNA, 20 nt, Artificial Sequence
  HTT spacer sequence TTCN PAM
aaacaauguuucacuaaaau

SEQ ID NO: 34234 - RNA, 20 nt, Artificial Sequence
  HTT spacer sequence TTCN PAM
aggaaaaauuaaugucuaua

SEQ ID NO: 34235 - RNA, 20 nt, Artificial Sequence
  HTT spacer sequence TTCN PAM
uagaauccuuuuggcuucua

SEQ ID NO: 34236 - RNA, 20 nt, Artificial Sequence
  HTT spacer sequence TTCN PAM
ugaauuaggagagauuuugg

SEQ ID NO: 34237 - RNA, 20 nt, Artificial Sequence
  HTT spacer sequence TTCN PAM
agaauauagacauuaauuuu

SEQ ID NO: 34238 - RNA, 20 nt, Artificial Sequence
  HTT spacer sequence TTCN PAM
uagucgcuuuuuccaguggc

SEQ ID NO: 34239 - RNA, 20 nt, Artificial Sequence
  HTT spacer sequence TTCN PAM
aguggcggugagaacgaaga

SEQ ID NO: 34240 - RNA, 20 nt, Artificial Sequence
  HTT spacer sequence TTCN PAM
caccgccacuggaaaaagcg

SEQ ID NO: 34241 - RNA, 20 nt, Artificial Sequence
  HTT spacer sequence TTCN PAM
uucucaccgccacuggaaaa

SEQ ID NO: 34242 - RNA, 20 nt, Artificial Sequence
  HTT spacer sequence TTCN PAM
cauugcucagaugaguuuau

SEQ ID NO: 34243 - RNA, 20 nt, Artificial Sequence
  HTT spacer sequence TTCN PAM
ggcugggacaugggauauau

SEQ ID NO: 34244 - RNA, 20 nt, Artificial Sequence
  HTT spacer sequence TTCN PAM
cccauugagagcugugucuu

SEQ ID NO: 34245 - RNA, 20 nt, Artificial Sequence
  HTT spacer sequence TTCN PAM
aacucuucuguuauagcugg

SEQ ID NO: 34246 - RNA, 20 nt, Artificial Sequence
  HTT spacer sequence TTCN PAM
guuauagcuggaaaauccuu

SEQ ID NO: 34247 - RNA, 20 nt, Artificial Sequence
  HTT spacer sequence TTCN PAM
agcuauaacagaagaguuug

SEQ ID NO: 34248 - RNA, 20 nt, Artificial Sequence
  HTT spacer sequence TTCN PAM
cuuaaaaaggauuuuccagc

SEQ ID NO: 34249 - RNA, 20 nt, Artificial Sequence
  HTT spacer sequence TTCN PAM
ucugucuuauaauuugggca

SEQ ID NO: 34250 - RNA, 20 nt, Artificial Sequence
  HTT spacer sequence TTCN PAM
cccuaauccuauauccaaca

SEQ ID NO: 34251 - RNA, 20 nt, Artificial Sequence
  HTT spacer sequence TTCN PAM
gguggcagccuagcucuugu

SEQ ID NO: 34252 - RNA, 20 nt, Artificial Sequence
  HTT spacer sequence TTCN PAM
ucaaaggcacaagagcuagg

SEQ ID NO: 34253 - RNA, 20 nt, Artificial Sequence
  HTT spacer sequence TTCN PAM
acagagccguccccagggua

SEQ ID NO: 34254 - RNA, 20 nt, Artificial Sequence
  HTT spacer sequence TTCN PAM
aaaucagugguuugcaaaua

SEQ ID NO: 34255 - RNA, 20 nt, Artificial Sequence
  HTT spacer sequence TTCN PAM
gaucuuaacaaaagccaucu

SEQ ID NO: 34256 - RNA, 20 nt, Artificial Sequence
  HTT spacer sequence TTCN PAM
ccuuuuuggcauuuuauuug

SEQ ID NO: 34257 - RNA, 20 nt, Artificial Sequence
  HTT spacer sequence TTCN PAM
caagguaaagaacuuauuuu

SEQ ID NO: 34258 - RNA, 20 nt, Artificial Sequence
  HTT spacer sequence TTCN PAM
uuaccuugagaaaucaaaua

SEQ ID NO: 34259 - RNA, 20 nt, Artificial Sequence
  HTT spacer sequence TTCN PAM
uauuauuuaguagauaggcc

SEQ ID NO: 34260 - RNA, 20 nt, Artificial Sequence
  HTT spacer sequence TTCN PAM
auguagauuuuggguuuccu

SEQ ID NO: 34261 - RNA, 20 nt, Artificial Sequence
  HTT spacer sequence TTCN PAM
uuugcucauuuuuucacucu

SEQ ID NO: 34262 - RNA, 20 nt, Artificial Sequence
  HTT spacer sequence TTCN PAM
cucuuaaucucacaucauug

SEQ ID NO: 34263 - RNA, 20 nt, Artificial Sequence
  HTT spacer sequence TTCN PAM
auaaacuuacaaugauguga

SEQ ID NO: 34264 - RNA, 20 nt, Artificial Sequence
  HTT spacer sequence TTCN PAM
gacuuuuucuuugaagagca

SEQ ID NO: 34265 - RNA, 20 nt, Artificial Sequence
  HTT spacer sequence TTCN PAM
uugaagagcagaaauuagaa

SEQ ID NO: 34266 - RNA, 20 nt, Artificial Sequence
  HTT spacer sequence TTCN PAM
aagaaaaagucagaaguaug

SEQ ID NO: 34267 - RNA, 20 nt, Artificial Sequence
  HTT spacer sequence TTCN PAM
gcucuucaaagaaaaaguca

SEQ ID NO: 34268 - RNA, 20 nt, Artificial Sequence
  HTT spacer sequence TTCN PAM
aauuucugcucuucaaagaa

SEQ ID NO: 34269 - RNA, 20 nt, Artificial Sequence
  HTT spacer sequence TTCN PAM
caauaauuauuuugauagug

SEQ ID NO: 34270 - RNA, 20 nt, Artificial Sequence
  HTT spacer sequence TTCN PAM
guuuuaaaucauauuaagac

SEQ ID NO: 34271 - RNA, 20 nt, Artificial Sequence
  HTT spacer sequence TTCN PAM
uuuguucucauuaauguaau

SEQ ID NO: 34272 - RNA, 20 nt, Artificial Sequence
  HTT spacer sequence TTCN PAM
cauuaauguaauucugaaga

SEQ ID NO: 34273 - RNA, 20 nt, Artificial Sequence
  HTT spacer sequence TTCN PAM
gaagaugaacaauaaaaugu

SEQ ID NO: 34274 - RNA, 20 nt, Artificial Sequence
  HTT spacer sequence TTCN PAM
gaauuacauuaaugagaaca

SEQ ID NO: 34275 - RNA, 20 nt, Artificial Sequence
  HTT spacer sequence TTCN PAM
ucuucagaauuacauuaaug

SEQ ID NO: 34276 - RNA, 20 nt, Artificial Sequence
  HTT spacer sequence TTCN PAM
aaaaauacauuuuauuguuc

SEQ ID NO: 34277 - RNA, 20 nt, Artificial Sequence
  HTT spacer sequence TTCN PAM
aaugaaauauuauuucaucc

SEQ ID NO: 34278 - RNA, 20 nt, Artificial Sequence
  HTT spacer sequence TTCN PAM
uuugaaaguucuaaaaauac

SEQ ID NO: 34279 - RNA, 20 nt, Artificial Sequence
  HTT spacer sequence TTCN PAM
uccuuccagaucauauaaug

SEQ ID NO: 34280 - RNA, 20 nt, Artificial Sequence
  HTT spacer sequence TTCN PAM
agaucauauaaugcuuaagu

SEQ ID NO: 34281 - RNA, 20 nt, Artificial Sequence
  HTT spacer sequence TTCN PAM
gauuguuaaucauaaagucu

SEQ ID NO: 34282 - RNA, 20 nt, Artificial Sequence
  HTT spacer sequence TTCN PAM
agacuuuaugauuaacaauc

SEQ ID NO: 34283 - RNA, 20 nt, Artificial Sequence
  HTT spacer sequence TTCN PAM
uuuuauuaucuuuuaauuuu

SEQ ID NO: 34284 - RNA, 20 nt, Artificial Sequence
  HTT spacer sequence TTCN PAM
ggugugucauuggagcuaug

SEQ ID NO: 34285 - RNA, 20 nt, Artificial Sequence
  HTT spacer sequence TTCN PAM
ugucauagcuccaaugacac

SEQ ID NO: 34286 - RNA, 20 nt, Artificial Sequence
  HTT spacer sequence TTCN PAM
aaggccaauagcauuggauc

SEQ ID NO: 34287 - RNA, 20 nt, Artificial Sequence
  HTT spacer sequence TTCN PAM
caaacuauaccacaaaacau

SEQ ID NO: 34288 - RNA, 20 nt, Artificial Sequence
  HTT spacer sequence TTCN PAM
auauagguuuauugacuuua

SEQ ID NO: 34289 - RNA, 20 nt, Artificial Sequence
  HTT spacer sequence TTCN PAM
aaacauaacaucucuacauu

SEQ ID NO: 34290 - RNA, 20 nt, Artificial Sequence
  HTT spacer sequence TTCN PAM
uuguguuuaauacuguggag

SEQ ID NO: 34291 - RNA, 20 nt, Artificial Sequence
  HTT spacer sequence TTCN PAM
uaugaguuucauuuuagagu

SEQ ID NO: 34292 - RNA, 20 nt, Artificial Sequence
  HTT spacer sequence TTCN PAM
uuuuagagugcauuuacuua

SEQ ID NO: 34293 - RNA, 20 nt, Artificial Sequence
  HTT spacer sequence TTCN PAM
aaauuaaguaaaugcacucu

SEQ ID NO: 34294 - RNA, 20 nt, Artificial Sequence
  HTT spacer sequence TTCN PAM
uuuuaguuugcuaaaaauaa

SEQ ID NO: 34295 - RNA, 20 nt, Artificial Sequence
  HTT spacer sequence TTCN PAM
ccuaagagcacuuugccuag

SEQ ID NO: 34296 - RNA, 20 nt, Artificial Sequence
  HTT spacer sequence TTCN PAM
ucuccuaagagcacuuugcc

SEQ ID NO: 34297 - RNA, 20 nt, Artificial Sequence
  HTT spacer sequence TTCN PAM
ucuucuccuaagagcacuuu

SEQ ID NO: 34298 - RNA, 20 nt, Artificial Sequence
  HTT spacer sequence TTCN PAM
gagucauccuccaaggcuuc

SEQ ID NO: 34299 - RNA, 20 nt, Artificial Sequence
  HTT spacer sequence TTCN PAM
cacuaguuagccgcuggugu

SEQ ID NO: 34300 - RNA, 20 nt, Artificial Sequence
  HTT spacer sequence TTCN PAM
cugucugccuuccaccccuu

SEQ ID NO: 34301 - RNA, 20 nt, Artificial Sequence
  HTT spacer sequence TTCN PAM
accccuugcccuuccugcuc

SEQ ID NO: 34302 - RNA, 20 nt, Artificial Sequence
  HTT spacer sequence TTCN PAM
ugcucgucccccugcaccug

SEQ ID NO: 34303 - RNA, 20 nt, Artificial Sequence
  HTT spacer sequence TTCN PAM
ggcuucuuuuauaauacuua

SEQ ID NO: 34304 - RNA, 20 nt, Artificial Sequence
  HTT spacer sequence TTCN PAM
uuuauaauacuuacucugaa

SEQ ID NO: 34305 - RNA, 20 nt, Artificial Sequence
  HTT spacer sequence TTCN PAM
gaguaaguauuauaaaagaa

SEQ ID NO: 34306 - RNA, 20 nt, Artificial Sequence
  HTT spacer sequence TTCN PAM
augguuuaggcuguuuuaaa

SEQ ID NO: 34307 - RNA, 20 nt, Artificial Sequence
  HTT spacer sequence TTCN PAM
accugccauccccuacucac

SEQ ID NO: 34308 - RNA, 20 nt, Artificial Sequence
  HTT spacer sequence TTCN PAM
caacccccagcauaacccau

SEQ ID NO: 34309 - RNA, 20 nt, Artificial Sequence
  HTT spacer sequence TTCN PAM
ucccauuucccaacccccag

SEQ ID NO: 34310 - RNA, 20 nt, Artificial Sequence
  HTT spacer sequence TTCN PAM
ucccauaauuuuucauccca

SEQ ID NO: 34311 - RNA, 20 nt, Artificial Sequence
  HTT spacer sequence TTCN PAM
aguuaaacuauccauaggca

SEQ ID NO: 34312 - RNA, 20 nt, Artificial Sequence
  HTT spacer sequence TTCN PAM
uucaaguuaaacuauccaua

SEQ ID NO: 34313 - RNA, 20 nt, Artificial Sequence
  HTT spacer sequence TTCN PAM
uuuuugagauagagucucac

SEQ ID NO: 34314 - RNA, 20 nt, Artificial Sequence
  HTT spacer sequence TTCN PAM
ggguuccagcgauucuccug

SEQ ID NO: 34315 - RNA, 20 nt, Artificial Sequence
  HTT spacer sequence TTCN PAM
agcgauucuccugccucagc

SEQ ID NO: 34316 - RNA, 20 nt, Artificial Sequence
  HTT spacer sequence TTCN PAM
ccugccucagccucccaagu

SEQ ID NO: 34317 - RNA, 20 nt, Artificial Sequence
  HTT spacer sequence TTCN PAM
agaccagccugaccaacaug

SEQ ID NO: 34318 - RNA, 20 nt, Artificial Sequence
  HTT spacer sequence TTCN PAM
uuagauaaguaucuguaacu

SEQ ID NO: 34319 - RNA, 20 nt, Artificial Sequence
  HTT spacer sequence TTCN PAM
cuguguacuuuauaaaagau

SEQ ID NO: 34320 - RNA, 20 nt, Artificial Sequence
  HTT spacer sequence TTCN PAM
guuaauccucaucuuuuaua

SEQ ID NO: 34321 - RNA, 20 nt, Artificial Sequence
  HTT spacer sequence TTCN PAM
uuuagauaggauuauacaac

SEQ ID NO: 34322 - RNA, 20 nt, Artificial Sequence
  HTT spacer sequence TTCN PAM
guuauagcuaaaauauucuu

SEQ ID NO: 34323 - RNA, 20 nt, Artificial Sequence
  HTT spacer sequence TTCN PAM
ucucuaaauauuuaagucuu

SEQ ID NO: 34324 - RNA, 20 nt, Artificial Sequence
  HTT spacer sequence TTCN PAM
gauuuuccucucuaaauauu

SEQ ID NO: 34325 - RNA, 20 nt, Artificial Sequence
  HTT spacer sequence TTCN PAM
aguaguaauuauuuauuuac

SEQ ID NO: 34326 - RNA, 20 nt, Artificial Sequence
  HTT spacer sequence TTCN PAM
ugucgaccuuuuugccauaa

SEQ ID NO: 34327 - RNA, 20 nt, Artificial Sequence
  HTT spacer sequence TTCN PAM
aaauuaccauuuaaaaacaa

SEQ ID NO: 34328 - RNA, 20 nt, Artificial Sequence
  HTT spacer sequence TTCN PAM
uaguugacuuucuaaauuac

SEQ ID NO: 34329 - RNA, 20 nt, Artificial Sequence
  HTT spacer sequence TTCN PAM
aggagaauaggacuggaguc

SEQ ID NO: 34330 - RNA, 20 nt, Artificial Sequence
  HTT spacer sequence TTCN PAM
ccuggaagauaaaccuguaa

SEQ ID NO: 34331 - RNA, 20 nt, Artificial Sequence
  HTT spacer sequence TTCN PAM
agaucucgacuccaguccua

SEQ ID NO: 34332 - RNA, 20 nt, Artificial Sequence
  HTT spacer sequence TTCN PAM
aagccacauucaagaucucg

SEQ ID NO: 34333 - RNA, 20 nt, Artificial Sequence
  HTT spacer sequence TTCN PAM
uccaagccacauucaagauc

SEQ ID NO: 34334 - RNA, 20 nt, Artificial Sequence
  HTT spacer sequence TTCN PAM
gaccacugcuugcuuagagg

SEQ ID NO: 34335 - RNA, 20 nt, Artificial Sequence
  HTT spacer sequence TTCN PAM
uaaccgacuacuccaagccu

SEQ ID NO: 34336 - RNA, 20 nt, Artificial Sequence
  HTT spacer sequence TTCN PAM
aguucuuaaccgacuacucc

SEQ ID NO: 34337 - RNA, 20 nt, Artificial Sequence
  HTT spacer sequence TTCN PAM
guuuuugcagugaaacagca

SEQ ID NO: 34338 - RNA, 20 nt, Artificial Sequence
  HTT spacer sequence TTCN PAM
cugcaaaaaccgaaguucaa

SEQ ID NO: 34339 - RNA, 20 nt, Artificial Sequence
  HTT spacer sequence TTCN PAM
caaaugcuguuucacugcaa

SEQ ID NO: 34340 - RNA, 20 nt, Artificial Sequence
  HTT spacer sequence TTCN PAM
gauaagccuuauuuuauaag

SEQ ID NO: 34341 - RNA, 20 nt, Artificial Sequence
  HTT spacer sequence TTCN PAM
agcaucucucacacugccuc

SEQ ID NO: 34342 - RNA, 20 nt, Artificial Sequence
  HTT spacer sequence TTCN PAM
gcaucuucaggaugcugugc

SEQ ID NO: 34343 - RNA, 20 nt, Artificial Sequence
  HTT spacer sequence TTCN PAM
ggaugcugugcagcugaaac

SEQ ID NO: 34344 - RNA, 20 nt, Artificial Sequence
  HTT spacer sequence TTCN PAM
gcugcacagcauccugaaga

SEQ ID NO: 34345 - RNA, 20 nt, Artificial Sequence
  HTT spacer sequence TTCN PAM
accguuaucaaauguuucag

SEQ ID NO: 34346 - RNA, 20 nt, Artificial Sequence
  HTT spacer sequence TTCN PAM
uuauuuugcaagccugugau

SEQ ID NO: 34347 - RNA, 20 nt, Artificial Sequence
  HTT spacer sequence TTCN PAM
cuauugaauguuuucucucg

SEQ ID NO: 34348 - RNA, 20 nt, Artificial Sequence
  HTT spacer sequence TTCN PAM
auagggaaucacaggcuugc

SEQ ID NO: 34349 - RNA, 20 nt, Artificial Sequence
  HTT spacer sequence TTCN PAM
cucgccauuugacaaaugag

SEQ ID NO: 34350 - RNA, 20 nt, Artificial Sequence
  HTT spacer sequence TTCN PAM
cugucuucagccucagugaa

SEQ ID NO: 34351 - RNA, 20 nt, Artificial Sequence
  HTT spacer sequence TTCN PAM
gccucagugaaggaugagau

SEQ ID NO: 34352 - RNA, 20 nt, Artificial Sequence
  HTT spacer sequence TTCN PAM
cugaggcugaagacagagaa

SEQ ID NO: 34353 - RNA, 20 nt, Artificial Sequence
  HTT spacer sequence TTCN PAM
ucagggguuuccacuccagg

SEQ ID NO: 34354 - RNA, 20 nt, Artificial Sequence
  HTT spacer sequence TTCN PAM
gggguuuccacuccaggguc

SEQ ID NO: 34355 - RNA, 20 nt, Artificial Sequence
  HTT spacer sequence TTCN PAM
acuccagggucagcagguca

SEQ ID NO: 34356 - RNA, 20 nt, Artificial Sequence
  HTT spacer sequence TTCN PAM
gugaugaugucaugaccugc

SEQ ID NO: 34357 - RNA, 20 nt, Artificial Sequence
  HTT spacer sequence TTCN PAM
gguccauggcagggucagau

SEQ ID NO: 34358 - RNA, 20 nt, Artificial Sequence
  HTT spacer sequence TTCN PAM
gugguggucugggagcuguc

SEQ ID NO: 34359 - RNA, 20 nt, Artificial Sequence
  HTT spacer sequence TTCN PAM
gcuguuaccccuucagacag

SEQ ID NO: 34360 - RNA, 20 nt, Artificial Sequence
  HTT spacer sequence TTCN PAM
gacaguucugaaauuguaag

SEQ ID NO: 34361 - RNA, 20 nt, Artificial Sequence
  HTT spacer sequence TTCN PAM
gaaauuguaagugggcagag

SEQ ID NO: 34362 - RNA, 20 nt, Artificial Sequence
  HTT spacer sequence TTCN PAM
gaacugucugaagggguaac

SEQ ID NO: 34363 - RNA, 20 nt, Artificial Sequence
  HTT spacer sequence TTCN PAM
agaccagccuggccaacaug

SEQ ID NO: 34364 - RNA, 20 nt, Artificial Sequence
  HTT spacer sequence TTCN PAM
ccauguuggccaggcugguc

SEQ ID NO: 34365 - RNA, 20 nt, Artificial Sequence
  HTT spacer sequence TTCN PAM
ccugccucagccucccuaac

SEQ ID NO: 34366 - RNA, 20 nt, Artificial Sequence
  HTT spacer sequence TTCN PAM
aaaaaaauaaaaaaauaaag

SEQ ID NO: 34367 - RNA, 20 nt, Artificial Sequence
  HTT spacer sequence TTCN PAM
cagcccacugcaacuucugc

SEQ ID NO: 34368 - RNA, 20 nt, Artificial Sequence
  HTT spacer sequence TTCN PAM
gccucccaggcucgagcgau

SEQ ID NO: 34369 - RNA, 20 nt, Artificial Sequence
  HTT spacer sequence TTCN PAM
cccgccucagccuccugagu

SEQ ID NO: 34370 - RNA, 20 nt, Artificial Sequence
  HTT spacer sequence TTCN PAM
guagagacaggguuucacca

SEQ ID NO: 34371 - RNA, 20 nt, Artificial Sequence
  HTT spacer sequence TTCN PAM
ccauguuggccaggcugguc

SEQ ID NO: 34372 - RNA, 20 nt, Artificial Sequence
  HTT spacer sequence TTCN PAM
ucccuggagaccuagaccug

SEQ ID NO: 34373 - RNA, 20 nt, Artificial Sequence
  HTT spacer sequence TTCN PAM
cuggagaccuagaccugaac

SEQ ID NO: 34374 - RNA, 20 nt, Artificial Sequence
  HTT spacer sequence TTCN PAM
ggucuaggucuccagggaag

SEQ ID NO: 34375 - RNA, 20 nt, Artificial Sequence
  HTT spacer sequence TTCN PAM
cuuguuaucuaauaccccua

SEQ ID NO: 34376 - RNA, 20 nt, Artificial Sequence
  HTT spacer sequence TTCN PAM
cugaaggaaacaacuuagug

SEQ ID NO: 34377 - RNA, 20 nt, Artificial Sequence
  HTT spacer sequence TTCN PAM
gugaagguaucagaugaggu

SEQ ID NO: 34378 - RNA, 20 nt, Artificial Sequence
  HTT spacer sequence TTCN PAM
uucagugaagguaucagaug

SEQ ID NO: 34379 - RNA, 20 nt, Artificial Sequence
  HTT spacer sequence TTCN PAM
acacaaaagacacuaaguug

SEQ ID NO: 34380 - RNA, 20 nt, Artificial Sequence
  HTT spacer sequence TTCN PAM
aauuuuuuaccucaguguuc

SEQ ID NO: 34381 - RNA, 20 nt, Artificial Sequence
  HTT spacer sequence TTCN PAM
uauaaucaacuauuccaauu

SEQ ID NO: 34382 - RNA, 20 nt, Artificial Sequence
  HTT spacer sequence TTCN PAM
uuaagaccacagaucuguuu

SEQ ID NO: 34383 - RNA, 20 nt, Artificial Sequence
  HTT spacer sequence TTCN PAM
uaaaauaaugcacaguauua

SEQ ID NO: 34384 - RNA, 20 nt, Artificial Sequence
  HTT spacer sequence TTCN PAM
aaaaacuuuuacaacauuuc

SEQ ID NO: 34385 - RNA, 20 nt, Artificial Sequence
  HTT spacer sequence TTCN PAM
cauuugauagcggcauaggu

SEQ ID NO: 34386 - RNA, 20 nt, Artificial Sequence
  HTT spacer sequence TTCN PAM
caucucuaaguuaguggaca

SEQ ID NO: 34387 - RNA, 20 nt, Artificial Sequence
  HTT spacer sequence TTCN PAM
guuuuaaaaacugugguuaa

SEQ ID NO: 34388 - RNA, 20 nt, Artificial Sequence
  HTT spacer sequence TTCN PAM
uaaccauuuuuugcguauac

SEQ ID NO: 34389 - RNA, 20 nt, Artificial Sequence
  HTT spacer sequence TTCN PAM
cugguauuaaauacauuuaa

SEQ ID NO: 34390 - RNA, 20 nt, Artificial Sequence
  HTT spacer sequence TTCN PAM
augacauuauuuaaauguau

SEQ ID NO: 34391 - RNA, 20 nt, Artificial Sequence
  HTT spacer sequence TTCN PAM
guguuacaugaucaaaaggu

SEQ ID NO: 34392 - RNA, 20 nt, Artificial Sequence
  HTT spacer sequence TTCN PAM
cauugaacucuauuccuccu

SEQ ID NO: 34393 - RNA, 20 nt, Artificial Sequence
  HTT spacer sequence TTCN PAM
augggaacagagcuucagug

SEQ ID NO: 34394 - RNA, 20 nt, Artificial Sequence
  HTT spacer sequence TTCN PAM
uccuuucccgccaagucccu

SEQ ID NO: 34395 - RNA, 20 nt, Artificial Sequence
  HTT spacer sequence TTCN PAM
cgccaagucccuggcaacca

SEQ ID NO: 34396 - RNA, 20 nt, Artificial Sequence
  HTT spacer sequence TTCN PAM
ucuuucugucuucugaauuu

SEQ ID NO: 34397 - RNA, 20 nt, Artificial Sequence
  HTT spacer sequence TTCN PAM
uucugucuucugaauuugac

SEQ ID NO: 34398 - RNA, 20 nt, Artificial Sequence
  HTT spacer sequence TTCN PAM
gucuucugaauuugacuacu

SEQ ID NO: 34399 - RNA, 20 nt, Artificial Sequence
  HTT spacer sequence TTCN PAM
gaauuugacuacuuuggguu

SEQ ID NO: 34400 - RNA, 20 nt, Artificial Sequence
  HTT spacer sequence TTCN PAM
gaagacagaaagaagaaucg

SEQ ID NO: 34401 - RNA, 20 nt, Artificial Sequence
  HTT spacer sequence TTCN PAM
cauauacuuuaggagucaca

SEQ ID NO: 34402 - RNA, 20 nt, Artificial Sequence
  HTT spacer sequence TTCN PAM
aacauaggcuacaacaugca

SEQ ID NO: 34403 - RNA, 20 nt, Artificial Sequence
  HTT spacer sequence TTCN PAM
uaauguuucaggccaaauac

SEQ ID NO: 34404 - RNA, 20 nt, Artificial Sequence
  HTT spacer sequence TTCN PAM
ggccaaauacuauuccauug

SEQ ID NO: 34405 - RNA, 20 nt, Artificial Sequence
  HTT spacer sequence TTCN PAM
auuguauggauaggccacau

SEQ ID NO: 34406 - RNA, 20 nt, Artificial Sequence
  HTT spacer sequence TTCN PAM
auuccucuguccauggacac

SEQ ID NO: 34407 - RNA, 20 nt, Artificial Sequence
  HTT spacer sequence TTCN PAM
ucuguccauggacacuugua

SEQ ID NO: 34408 - RNA, 20 nt, Artificial Sequence
  HTT spacer sequence TTCN PAM
uguuuuagccauugugaauc

SEQ ID NO: 34409 - RNA, 20 nt, Artificial Sequence
  HTT spacer sequence TTCN PAM
caauggcuaaaacaugaagc

SEQ ID NO: 34410 - RNA, 20 nt, Artificial Sequence
  HTT spacer sequence TTCN PAM
uaacagcaugauucacaaug

SEQ ID NO: 34411 - RNA, 20 nt, Artificial Sequence
  HTT spacer sequence TTCN PAM
auuuuuuuggcuaaauaccc

SEQ ID NO: 34412 - RNA, 20 nt, Artificial Sequence
  HTT spacer sequence TTCN PAM
ggguauuuagccaaaaaaau

SEQ ID NO: 34413 - RNA, 20 nt, Artificial Sequence
  HTT spacer sequence TTCN PAM
aauuuuaauuuaaaacauuc

SEQ ID NO: 34414 - RNA, 20 nt, Artificial Sequence
  HTT spacer sequence TTCN PAM
uaucauugaguguuuuacuu

SEQ ID NO: 34415 - RNA, 20 nt, Artificial Sequence
  HTT spacer sequence TTCN PAM
guuuuuuuagguaaauuaca

SEQ ID NO: 34416 - RNA, 20 nt, Artificial Sequence
  HTT spacer sequence TTCN PAM
aguggacaugaaacaucuug

SEQ ID NO: 34417 - RNA, 20 nt, Artificial Sequence
  HTT spacer sequence TTCN PAM
uguccacuugaaauguccug

SEQ ID NO: 34418 - RNA, 20 nt, Artificial Sequence
  HTT spacer sequence TTCN PAM
acaucacaagauguuucaug

SEQ ID NO: 34419 - RNA, 20 nt, Artificial Sequence
  HTT spacer sequence TTCN PAM
uauguuuagccaucagcuug

SEQ ID NO: 34420 - RNA, 20 nt, Artificial Sequence
  HTT spacer sequence TTCN PAM
acaaaaaccuaacaauauaa

SEQ ID NO: 34421 - RNA, 20 nt, Artificial Sequence
  HTT spacer sequence TTCN PAM
aacuugcuguaaaauuuguu

SEQ ID NO: 34422 - RNA, 20 nt, Artificial Sequence
  HTT spacer sequence TTCN PAM
caaacaaauuuuacagcaag

SEQ ID NO: 34423 - RNA, 20 nt, Artificial Sequence
  HTT spacer sequence TTCN PAM
uuuucauauuaaaaagaaau

SEQ ID NO: 34424 - RNA, 20 nt, Artificial Sequence
  HTT spacer sequence TTCN PAM
uauuaaaaagaaauguccac

SEQ ID NO: 34425 - RNA, 20 nt, Artificial Sequence
  HTT spacer sequence TTCN PAM
uuuuaauaugaaaaagaaaa

SEQ ID NO: 34426 - RNA, 20 nt, Artificial Sequence
  HTT spacer sequence TTCN PAM
aauguggacauuucuuuuua

SEQ ID NO: 34427 - RNA, 20 nt, Artificial Sequence
  HTT spacer sequence TTCN PAM
uaauguagugggaaugagug

SEQ ID NO: 34428 - RNA, 20 nt, Artificial Sequence
  HTT spacer sequence TTCN PAM
cacuacauuaugaaaagcuc

SEQ ID NO: 34429 - RNA, 20 nt, Artificial Sequence
  HTT spacer sequence TTCN PAM
augcgugcauuucugugccu

SEQ ID NO: 34430 - RNA, 20 nt, Artificial Sequence
  HTT spacer sequence TTCN PAM
gugccuugaaauaaaugaca

SEQ ID NO: 34431 - RNA, 20 nt, Artificial Sequence
  HTT spacer sequence TTCN PAM
aggcacagaaaugcacgcau

SEQ ID NO: 34432 - RNA, 20 nt, Artificial Sequence
  HTT spacer sequence TTCN PAM
guguguaaaaugugcucuuu

SEQ ID NO: 34433 - RNA, 20 nt, Artificial Sequence
  HTT spacer sequence TTCN PAM
ucauugcacuuccauguugg

SEQ ID NO: 34434 - RNA, 20 nt, Artificial Sequence
  HTT spacer sequence TTCN PAM
auguuggagggcuugucucu

SEQ ID NO: 34435 - RNA, 20 nt, Artificial Sequence
  HTT spacer sequence TTCN PAM
aaauucucacagccccccuu

SEQ ID NO: 34436 - RNA, 20 nt, Artificial Sequence
  HTT spacer sequence TTCN PAM
cacagccccccuugaaccgu

SEQ ID NO: 34437 - RNA, 20 nt, Artificial Sequence
  HTT spacer sequence TTCN PAM
aggggggcugugagaauuuu

SEQ ID NO: 34438 - RNA, 20 nt, Artificial Sequence
  HTT spacer sequence TTCN PAM
uccuggggcuguccaaucug

SEQ ID NO: 34439 - RNA, 20 nt, Artificial Sequence
  HTT spacer sequence TTCN PAM
ucaucuucauccuggggcug

SEQ ID NO: 34440 - RNA, 20 nt, Artificial Sequence
  HTT spacer sequence TTCN PAM
uccugaugaagccucggagg

SEQ ID NO: 34441 - RNA, 20 nt, Artificial Sequence
  HTT spacer sequence TTCN PAM
ugaugaagccucggaggccu

SEQ ID NO: 34442 - RNA, 20 nt, Artificial Sequence
  HTT spacer sequence TTCN PAM
ucaggaagaauaccuguggc

SEQ ID NO: 34443 - RNA, 20 nt, Artificial Sequence
  HTT spacer sequence TTCN PAM
ggaacucuuccauggguaug

SEQ ID NO: 34444 - RNA, 20 nt, Artificial Sequence
  HTT spacer sequence TTCN PAM
ugaaggccuccgaggcuuca

SEQ ID NO: 34445 - RNA, 20 nt, Artificial Sequence
  HTT spacer sequence TTCN PAM
auggguauguggacuacagg

SEQ ID NO: 34446 - RNA, 20 nt, Artificial Sequence
  HTT spacer sequence TTCN PAM
gaccuggacaucuuaauuau

SEQ ID NO: 34447 - RNA, 20 nt, Artificial Sequence
  HTT spacer sequence TTCN PAM
aagaagaaguccuuugauac

SEQ ID NO: 34448 - RNA, 20 nt, Artificial Sequence
  HTT spacer sequence TTCN PAM
uggaagcaaagauauaauua

SEQ ID NO: 34449 - RNA, 20 nt, Artificial Sequence
  HTT spacer sequence TTCN PAM
ucuuggaagcaaagauauaa

SEQ ID NO: 34450 - RNA, 20 nt, Artificial Sequence
  HTT spacer sequence TTCN PAM
gaguucugaauagcugauga

SEQ ID NO: 34451 - RNA, 20 nt, Artificial Sequence
  HTT spacer sequence TTCN PAM
gaauagcugaugaaaaugac

SEQ ID NO: 34452 - RNA, 20 nt, Artificial Sequence
  HTT spacer sequence TTCN PAM
gaacucagaaaacaguauca

SEQ ID NO: 34453 - RNA, 20 nt, Artificial Sequence
  HTT spacer sequence TTCN PAM
ucagcuauucagaacucaga

SEQ ID NO: 34454 - RNA, 20 nt, Artificial Sequence
  HTT spacer sequence TTCN PAM
ucaauuggucauuuucauca

SEQ ID NO: 34455 - RNA, 20 nt, Artificial Sequence
  HTT spacer sequence TTCN PAM
ugaucuaaaucuuauacuuu

SEQ ID NO: 34456 - RNA, 20 nt, Artificial Sequence
  HTT spacer sequence TTCN PAM
acuuaaaauacaauuauaca

SEQ ID NO: 34457 - RNA, 20 nt, Artificial Sequence
  HTT spacer sequence TTCN PAM
cuguuuuuaaagcccuucaa

SEQ ID NO: 34458 - RNA, 20 nt, Artificial Sequence
  HTT spacer sequence TTCN PAM
acaggcacauuuauugaaaa

SEQ ID NO: 34459 - RNA, 20 nt, Artificial Sequence
  HTT spacer sequence TTCN PAM
auaaaugugccuguugaagg

SEQ ID NO: 34460 - RNA, 20 nt, Artificial Sequence
  HTT spacer sequence TTCN PAM
gacagcaguguugauaaauu

SEQ ID NO: 34461 - RNA, 20 nt, Artificial Sequence
  HTT spacer sequence TTCN PAM
ucucucaacacaaauuuauc

SEQ ID NO: 34462 - RNA, 20 nt, Artificial Sequence
  HTT spacer sequence TTCN PAM
guagcuucaucucucaacac

SEQ ID NO: 34463 - RNA, 20 nt, Artificial Sequence
  HTT spacer sequence TTCN PAM
ugaucacccgguucaguagc

SEQ ID NO: 34464 - RNA, 20 nt, Artificial Sequence
  HTT spacer sequence TTCN PAM
gagcuugugugaggauuuaa

SEQ ID NO: 34465 - RNA, 20 nt, Artificial Sequence
  HTT spacer sequence TTCN PAM
caucccugggccuuuaaauu

SEQ ID NO: 34466 - RNA, 20 nt, Artificial Sequence
  HTT spacer sequence TTCN PAM
ccuuuaaauaccagcucuuc

SEQ ID NO: 34467 - RNA, 20 nt, Artificial Sequence
  HTT spacer sequence TTCN PAM
caggccuguuguuuucugcc

SEQ ID NO: 34468 - RNA, 20 nt, Artificial Sequence
  HTT spacer sequence TTCN PAM
gccuuuccagguacuaccca

SEQ ID NO: 34469 - RNA, 20 nt, Artificial Sequence
  HTT spacer sequence TTCN PAM
agguacuacccacagccuug

SEQ ID NO: 34470 - RNA, 20 nt, Artificial Sequence
  HTT spacer sequence TTCN PAM
caaggcuguggguaguaccu

SEQ ID NO: 34471 - RNA, 20 nt, Artificial Sequence
  HTT spacer sequence TTCN PAM
gccuccuuugagagugugcc

SEQ ID NO: 34472 - RNA, 20 nt, Artificial Sequence
  HTT spacer sequence TTCN PAM
guacugaauguuuccuuguc

SEQ ID NO: 34473 - RNA, 20 nt, Artificial Sequence
  HTT spacer sequence TTCN PAM
guacagaauagauuugucug

SEQ ID NO: 34474 - RNA, 20 nt, Artificial Sequence
  HTT spacer sequence TTCN PAM
uugucugauuucuuggauca

SEQ ID NO: 34475 - RNA, 20 nt, Artificial Sequence
  HTT spacer sequence TTCN PAM
uggaucauucauuugauggu

SEQ ID NO: 34476 - RNA, 20 nt, Artificial Sequence
  HTT spacer sequence TTCN PAM
uuugaugguugcguauggcc

SEQ ID NO: 34477 - RNA, 20 nt, Artificial Sequence
  HTT spacer sequence TTCN PAM
uguuuugguucuacugaacu

SEQ ID NO: 34478 - RNA, 20 nt, Artificial Sequence
  HTT spacer sequence TTCN PAM
acugaacuguucuaaaaguc

SEQ ID NO: 34479 - RNA, 20 nt, Artificial Sequence
  HTT spacer sequence TTCN PAM
guagaaccaaaacaagaaac

SEQ ID NO: 34480 - RNA, 20 nt, Artificial Sequence
  HTT spacer sequence TTCN PAM
aaaagucucucuucauauua

SEQ ID NO: 34481 - RNA, 20 nt, Artificial Sequence
  HTT spacer sequence TTCN PAM
uauuaucuuuuuacauguaa

SEQ ID NO: 34482 - RNA, 20 nt, Artificial Sequence
  HTT spacer sequence TTCN PAM
cuuuuaauuccucaaggaca

SEQ ID NO: 34483 - RNA, 20 nt, Artificial Sequence
  HTT spacer sequence TTCN PAM
ucaaggacaaggaauagcgu

SEQ ID NO: 34484 - RNA, 20 nt, Artificial Sequence
  HTT spacer sequence TTCN PAM
uuguccuugaggaauuaaaa

SEQ ID NO: 34485 - RNA, 20 nt, Artificial Sequence
  HTT spacer sequence TTCN PAM
caguucgucccaucaaucag

SEQ ID NO: 34486 - RNA, 20 nt, Artificial Sequence
  HTT spacer sequence TTCN PAM
ucccaucaaucagaauuaua

SEQ ID NO: 34487 - RNA, 20 nt, Artificial Sequence
  HTT spacer sequence TTCN PAM
gauugaugggacgaacugug

SEQ ID NO: 34488 - RNA, 20 nt, Artificial Sequence
  HTT spacer sequence TTCN PAM
ucuuagauuugggcuucccc

SEQ ID NO: 34489 - RNA, 20 nt, Artificial Sequence
  HTT spacer sequence TTCN PAM
ccaggcuguugccuuucccc

SEQ ID NO: 34490 - RNA, 20 nt, Artificial Sequence
  HTT spacer sequence TTCN PAM
ccaaguagcuucugcuuguc

SEQ ID NO: 34491 - RNA, 20 nt, Artificial Sequence
  HTT spacer sequence TTCN PAM
gcuuguccuguagaagaccu

SEQ ID NO: 34492 - RNA, 20 nt, Artificial Sequence
  HTT spacer sequence TTCN PAM
acaggacaagcagaagcuac

SEQ ID NO: 34493 - RNA, 20 nt, Artificial Sequence
  HTT spacer sequence TTCN PAM
ugcuuugcuucugcagcagc

SEQ ID NO: 34494 - RNA, 20 nt, Artificial Sequence
  HTT spacer sequence TTCN PAM
gcagcagccguuccugaaug

SEQ ID NO: 34495 - RNA, 20 nt, Artificial Sequence
  HTT spacer sequence TTCN PAM
ugaaugccuagugucaacug

SEQ ID NO: 34496 - RNA, 20 nt, Artificial Sequence
  HTT spacer sequence TTCN PAM
ggaacggcugcugcagaagc

SEQ ID NO: 34497 - RNA, 20 nt, Artificial Sequence
  HTT spacer sequence TTCN PAM
uaccacgcccacccucccug

SEQ ID NO: 34498 - RNA, 20 nt, Artificial Sequence
  HTT spacer sequence TTCN PAM
gcuuggccauggucucugug

SEQ ID NO: 34499 - RNA, 20 nt, Artificial Sequence
  HTT spacer sequence TTCN PAM
agagcagcacuuaagccagg

SEQ ID NO: 34500 - RNA, 20 nt, Artificial Sequence
  HTT spacer sequence TTCN PAM
acagauaguuccagagcagc

SEQ ID NO: 34501 - RNA, 20 nt, Artificial Sequence
  HTT spacer sequence TTCN PAM
uucaacagauaguuccagag

SEQ ID NO: 34502 - RNA, 20 nt, Artificial Sequence
  HTT spacer sequence TTCN PAM
ugcauuaguucauucaacag

SEQ ID NO: 34503 - RNA, 20 nt, Artificial Sequence
  HTT spacer sequence TTCN PAM
agccuugccgcaucaaaggu

SEQ ID NO: 34504 - RNA, 20 nt, Artificial Sequence
  HTT spacer sequence TTCN PAM
uuuuugcuaacagggggaaa

SEQ ID NO: 34505 - RNA, 20 nt, Artificial Sequence
  HTT spacer sequence TTCN PAM
cccuguuagcaaaaacgaag

SEQ ID NO: 34506 - RNA, 20 nt, Artificial Sequence
  HTT spacer sequence TTCN PAM
acugugcacauccccuuuug

SEQ ID NO: 34507 - RNA, 20 nt, Artificial Sequence
  HTT spacer sequence TTCN PAM
uucaacugugcacauccccu

SEQ ID NO: 34508 - RNA, 20 nt, Artificial Sequence
  HTT spacer sequence TTCN PAM
gaggucagcuugguggccug

SEQ ID NO: 34509 - RNA, 20 nt, Artificial Sequence
  HTT spacer sequence TTCN PAM
ucugcugcacgcaaggcaaa

SEQ ID NO: 34510 - RNA, 20 nt, Artificial Sequence
  HTT spacer sequence TTCN PAM
acuuccucugcugcacgcaa

SEQ ID NO: 34511 - RNA, 20 nt, Artificial Sequence
  HTT spacer sequence TTCN PAM
cuagccgaggggagggagga

SEQ ID NO: 34512 - RNA, 20 nt, Artificial Sequence
  HTT spacer sequence TTCN PAM
ucccuccccucggcuaguga

SEQ ID NO: 34513 - RNA, 20 nt, Artificial Sequence
  HTT spacer sequence TTCN PAM
uuugaaaacaaucuguuguu

SEQ ID NO: 34514 - RNA, 20 nt, Artificial Sequence
  HTT spacer sequence TTCN PAM
aaugaacaaaaccagaccca

SEQ ID NO: 34515 - RNA, 20 nt, Artificial Sequence
  HTT spacer sequence TTCN PAM
gccucaaacaacagauuguu

SEQ ID NO: 34516 - RNA, 20 nt, Artificial Sequence
  HTT spacer sequence TTCN PAM
uggcagugcugguuccggac

SEQ ID NO: 34517 - RNA, 20 nt, Artificial Sequence
  HTT spacer sequence TTCN PAM
ggacagggaugugaggguca

SEQ ID NO: 34518 - RNA, 20 nt, Artificial Sequence
  HTT spacer sequence TTCN PAM
cgcugacccucacaucccug

SEQ ID NO: 34519 - RNA, 20 nt, Artificial Sequence
  HTT spacer sequence TTCN PAM
ggguggagggccacagcugc

SEQ ID NO: 34520 - RNA, 20 nt, Artificial Sequence
  HTT spacer sequence TTCN PAM
ucagcaaacucuauaaaguu

SEQ ID NO: 34521 - RNA, 20 nt, Artificial Sequence
  HTT spacer sequence TTCN PAM
gcaaacucuauaaaguuccu

SEQ ID NO: 34522 - RNA, 20 nt, Artificial Sequence
  HTT spacer sequence TTCN PAM
ucuugacaccacggaauacc

SEQ ID NO: 34523 - RNA, 20 nt, Artificial Sequence
  HTT spacer sequence TTCN PAM
guggugucaagaggaacuuu

SEQ ID NO: 34524 - RNA, 20 nt, Artificial Sequence
  HTT spacer sequence TTCN PAM
caucuuauuuucucagauuu

SEQ ID NO: 34525 - RNA, 20 nt, Artificial Sequence
  HTT spacer sequence TTCN PAM
cagauuuaaucauuauugua

SEQ ID NO: 34526 - RNA, 20 nt, Artificial Sequence
  HTT spacer sequence TTCN PAM
guauugacuauuuuaguuuu

SEQ ID NO: 34527 - RNA, 20 nt, Artificial Sequence
  HTT spacer sequence TTCN PAM
uuugggauauuugaccugcg

SEQ ID NO: 34528 - RNA, 20 nt, Artificial Sequence
  HTT spacer sequence TTCN PAM
gaaaacacaugaauagugaa

SEQ ID NO: 34529 - RNA, 20 nt, Artificial Sequence
  HTT spacer sequence TTCN PAM
gaagagcuacaacgcagguc

SEQ ID NO: 34530 - RNA, 20 nt, Artificial Sequence
  HTT spacer sequence TTCN PAM
uguguuuucugaagagcuac

SEQ ID NO: 34531 - RNA, 20 nt, Artificial Sequence
  HTT spacer sequence TTCN PAM
cuauucauguguuuucugaa

SEQ ID NO: 34532 - RNA, 20 nt, Artificial Sequence
  HTT spacer sequence TTCN PAM
uuguuucauggguucccuuu

SEQ ID NO: 34533 - RNA, 20 nt, Artificial Sequence
  HTT spacer sequence TTCN PAM
uggguucccuuuagaugaaa

SEQ ID NO: 34534 - RNA, 20 nt, Artificial Sequence
  HTT spacer sequence TTCN PAM
cuuuagaugaaacccauaga

SEQ ID NO: 34535 - RNA, 20 nt, Artificial Sequence
  HTT spacer sequence TTCN PAM
ucuaaagggaacccaugaaa

SEQ ID NO: 34536 - RNA, 20 nt, Artificial Sequence
  HTT spacer sequence TTCN PAM
ccucuauggguuucaucuaa

SEQ ID NO: 34537 - RNA, 20 nt, Artificial Sequence
  HTT spacer sequence TTCN PAM
acuuuucuccucuauggguu

SEQ ID NO: 34538 - RNA, 20 nt, Artificial Sequence
  HTT spacer sequence TTCN PAM
cacucagggugagugggaac

SEQ ID NO: 34539 - RNA, 20 nt, Artificial Sequence
  HTT spacer sequence TTCN PAM
cacucacccugagugugaau

SEQ ID NO: 34540 - RNA, 20 nt, Artificial Sequence
  HTT spacer sequence TTCN PAM
cguucucucuuuuucuuugg

SEQ ID NO: 34541 - RNA, 20 nt, Artificial Sequence
  HTT spacer sequence TTCN PAM
cucuuuuucuuugggugaga

SEQ ID NO: 34542 - RNA, 20 nt, Artificial Sequence
  HTT spacer sequence TTCN PAM
uugggugagaggguacacuu

SEQ ID NO: 34543 - RNA, 20 nt, Artificial Sequence
  HTT spacer sequence TTCN PAM
aaaacacaaguguacccucu

SEQ ID NO: 34544 - RNA, 20 nt, Artificial Sequence
  HTT spacer sequence TTCN PAM
aaucuuuuuuaaguggaauc

SEQ ID NO: 34545 - RNA, 20 nt, Artificial Sequence
  HTT spacer sequence TTCN PAM
acuuaaaaaagauuagaaaa

SEQ ID NO: 34546 - RNA, 20 nt, Artificial Sequence
  HTT spacer sequence TTCN PAM
agauuccacuuaaaaaagau

SEQ ID NO: 34547 - RNA, 20 nt, Artificial Sequence
  HTT spacer sequence TTCN PAM
agguugucagauaauaaauc

SEQ ID NO: 34548 - RNA, 20 nt, Artificial Sequence
  HTT spacer sequence TTCN PAM
ggauuauaauucuagguugu

SEQ ID NO: 34549 - RNA, 20 nt, Artificial Sequence
  HTT spacer sequence TTCN PAM
ucauauugccaauauguccu

SEQ ID NO: 34550 - RNA, 20 nt, Artificial Sequence
  HTT spacer sequence TTCN PAM
uaaauccugaaacuuuuuuu

SEQ ID NO: 34551 - RNA, 20 nt, Artificial Sequence
  HTT spacer sequence TTCN PAM
ggauuuaagaauuagagauu

SEQ ID NO: 34552 - RNA, 20 nt, Artificial Sequence
  HTT spacer sequence TTCN PAM
cuauaauaacccuaagugau

SEQ ID NO: 34553 - RNA, 20 nt, Artificial Sequence
  HTT spacer sequence TTCN PAM
gaauuuggaucuucucuuca

SEQ ID NO: 34554 - RNA, 20 nt, Artificial Sequence
  HTT spacer sequence TTCN PAM
gaaaugacuucacuauaaua

SEQ ID NO: 34555 - RNA, 20 nt, Artificial Sequence
  HTT spacer sequence TTCN PAM
cuucacaccucuuuuucucu

SEQ ID NO: 34556 - RNA, 20 nt, Artificial Sequence
  HTT spacer sequence TTCN PAM
caccucuuuuucucuuuccu

SEQ ID NO: 34557 - RNA, 20 nt, Artificial Sequence
  HTT spacer sequence TTCN PAM
cuuuccugagaauuaagcuu

SEQ ID NO: 34558 - RNA, 20 nt, Artificial Sequence
  HTT spacer sequence TTCN PAM
ugagaauuaagcuuuuguuu

SEQ ID NO: 34559 - RNA, 20 nt, Artificial Sequence
  HTT spacer sequence TTCN PAM
caggaaagagaaaaagaggu

SEQ ID NO: 34560 - RNA, 20 nt, Artificial Sequence
  HTT spacer sequence TTCN PAM
aguuagaaaguugauaguag

SEQ ID NO: 34561 - RNA, 20 nt, Artificial Sequence
  HTT spacer sequence TTCN PAM
aacucgaaacaaaagcuuaa

SEQ ID NO: 34562 - RNA, 20 nt, Artificial Sequence
  HTT spacer sequence TTCN PAM
cuacuaucaacuuucuaacu

SEQ ID NO: 34563 - RNA, 20 nt, Artificial Sequence
  HTT spacer sequence TTCN PAM
auggcugagcaauuuaucuc

SEQ ID NO: 34564 - RNA, 20 nt, Artificial Sequence
  HTT spacer sequence TTCN PAM
ucuguggagauaaauugcuc

SEQ ID NO: 34565 - RNA, 20 nt, Artificial Sequence
  HTT spacer sequence TTCN PAM
agaugucugagacauacugu

SEQ ID NO: 34566 - RNA, 20 nt, Artificial Sequence
  HTT spacer sequence TTCN PAM
aggagccacugccauucucu

SEQ ID NO: 34567 - RNA, 20 nt, Artificial Sequence
  HTT spacer sequence TTCN PAM
cugugggacccucaucugcu

SEQ ID NO: 34568 - RNA, 20 nt, Artificial Sequence
  HTT spacer sequence TTCN PAM
acgugggagauuggaugggc

SEQ ID NO: 34569 - RNA, 20 nt, Artificial Sequence
  HTT spacer sequence TTCN PAM
aauggugcccauccaaucuc

SEQ ID NO: 34570 - RNA, 20 nt, Artificial Sequence
  HTT spacer sequence TTCN PAM
gcuguguuuuuucuaguuau

SEQ ID NO: 34571 - RNA, 20 nt, Artificial Sequence
  HTT spacer sequence TTCN PAM
aguuaugcuuacuaagguuu

SEQ ID NO: 34572 - RNA, 20 nt, Artificial Sequence
  HTT spacer sequence TTCN PAM
ucugguuaggaaauacauuu

SEQ ID NO: 34573 - RNA, 20 nt, Artificial Sequence
  HTT spacer sequence TTCN PAM
gguuaggaaauacauuuucu

SEQ ID NO: 34574 - RNA, 20 nt, Artificial Sequence
  HTT spacer sequence TTCN PAM
uaaccagaagaacaagcaac

SEQ ID NO: 34575 - RNA, 20 nt, Artificial Sequence
  HTT spacer sequence TTCN PAM
uuggcggauugcauuccuuu

SEQ ID NO: 34576 - RNA, 20 nt, Artificial Sequence
  HTT spacer sequence TTCN PAM
uuugcugcggaaaacacuga

SEQ ID NO: 34577 - RNA, 20 nt, Artificial Sequence
  HTT spacer sequence TTCN PAM
gcagcaaaggaaugcaaucc

SEQ ID NO: 34578 - RNA, 20 nt, Artificial Sequence
  HTT spacer sequence TTCN PAM
guguuuuccgcagcaaagga

SEQ ID NO: 34579 - RNA, 20 nt, Artificial Sequence
  HTT spacer sequence TTCN PAM
guuacuugcaaguuagcuug

SEQ ID NO: 34580 - RNA, 20 nt, Artificial Sequence
  HTT spacer sequence TTCN PAM
guggaaccauuucuucacuu

SEQ ID NO: 34581 - RNA, 20 nt, Artificial Sequence
  HTT spacer sequence TTCN PAM
acagaagauuaugcucaccc

SEQ ID NO: 34582 - RNA, 20 nt, Artificial Sequence
  HTT spacer sequence TTCN PAM
ucacuuaguggacauuuuau

SEQ ID NO: 34583 - RNA, 20 nt, Artificial Sequence
  HTT spacer sequence TTCN PAM
cuuaguggacauuuuaucau

SEQ ID NO: 34584 - RNA, 20 nt, Artificial Sequence
  HTT spacer sequence TTCN PAM
uauuaagcuccaauuuuaau

SEQ ID NO: 34585 - RNA, 20 nt, Artificial Sequence
  HTT spacer sequence TTCN PAM
augcacucuaaagcuguaac

SEQ ID NO: 34586 - RNA, 20 nt, Artificial Sequence
  HTT spacer sequence TTCN PAM
aaagcugagagauggauaca

SEQ ID NO: 34587 - RNA, 20 nt, Artificial Sequence
  HTT spacer sequence TTCN PAM
uucuaaagcugagagaugga

SEQ ID NO: 34588 - RNA, 20 nt, Artificial Sequence
  HTT spacer sequence TTCN PAM
uaaacuucaguuuaaguucu

SEQ ID NO: 34589 - RNA, 20 nt, Artificial Sequence
  HTT spacer sequence TTCN PAM
guuuaaguucuaauucucag

SEQ ID NO: 34590 - RNA, 20 nt, Artificial Sequence
  HTT spacer sequence TTCN PAM
aauucucagaauauuuguuu

SEQ ID NO: 34591 - RNA, 20 nt, Artificial Sequence
  HTT spacer sequence TTCN PAM
cagaauauuuguuugaaaua

SEQ ID NO: 34592 - RNA, 20 nt, Artificial Sequence
  HTT spacer sequence TTCN PAM
gagaauuagaacuuaaacug

SEQ ID NO: 34593 - RNA, 20 nt, Artificial Sequence
  HTT spacer sequence TTCN PAM
aacaaauauucugagaauua

SEQ ID NO: 34594 - RNA, 20 nt, Artificial Sequence
  HTT spacer sequence TTCN PAM
uaaaggauauauuuagaaau

SEQ ID NO: 34595 - RNA, 20 nt, Artificial Sequence
  HTT spacer sequence TTCN PAM
aaauauauccuuuaggaaga

SEQ ID NO: 34596 - RNA, 20 nt, Artificial Sequence
  HTT spacer sequence TTCN PAM
acagacuuuacacuuaauga

SEQ ID NO: 34597 - RNA, 20 nt, Artificial Sequence
  HTT spacer sequence TTCN PAM
accuuggccucccaaagugg

SEQ ID NO: 34598 - RNA, 20 nt, Artificial Sequence
  HTT spacer sequence TTCN PAM
agacuaugggcaacauaguu

SEQ ID NO: 34599 - RNA, 20 nt, Artificial Sequence
  HTT spacer sequence TTCN PAM
guagggacagggucaacuau

SEQ ID NO: 34600 - RNA, 20 nt, Artificial Sequence
  HTT spacer sequence TTCN PAM
cgaguagcugagacuacagg

SEQ ID NO: 34601 - RNA, 20 nt, Artificial Sequence
  HTT spacer sequence TTCN PAM
acugauuauuauuacuauua

SEQ ID NO: 34602 - RNA, 20 nt, Artificial Sequence
  HTT spacer sequence TTCN PAM
guauaaaguggaauaggcuc

SEQ ID NO: 34603 - RNA, 20 nt, Artificial Sequence
  HTT spacer sequence TTCN PAM
acuuuauacagaaacagagg

SEQ ID NO: 34604 - RNA, 20 nt, Artificial Sequence
  HTT spacer sequence TTCN PAM
uuaagugauagcauguugaa

SEQ ID NO: 34605 - RNA, 20 nt, Artificial Sequence
  HTT spacer sequence TTCN PAM
acaugcuaucacuuaaagaa

SEQ ID NO: 34606 - RNA, 20 nt, Artificial Sequence
  HTT spacer sequence TTCN PAM
auaccaacuggcucauaagu

SEQ ID NO: 34607 - RNA, 20 nt, Artificial Sequence
  HTT spacer sequence TTCN PAM
cucuaguuuccagguuuuca

SEQ ID NO: 34608 - RNA, 20 nt, Artificial Sequence
  HTT spacer sequence TTCN PAM
agguuuucagucaguugugu

SEQ ID NO: 34609 - RNA, 20 nt, Artificial Sequence
  HTT spacer sequence TTCN PAM
gucaguugugucuuuuuuga

SEQ ID NO: 34610 - RNA, 20 nt, Artificial Sequence
  HTT spacer sequence TTCN PAM
gcucaaaaaagacacaacug

SEQ ID NO: 34611 - RNA, 20 nt, Artificial Sequence
  HTT spacer sequence TTCN PAM
uucugcucaaaaaagacaca

SEQ ID NO: 34612 - RNA, 20 nt, Artificial Sequence
  HTT spacer sequence TTCN PAM
guucucucgugcuguggagu

SEQ ID NO: 34613 - RNA, 20 nt, Artificial Sequence
  HTT spacer sequence TTCN PAM
cucgugcuguggaguacaua

SEQ ID NO: 34614 - RNA, 20 nt, Artificial Sequence
  HTT spacer sequence TTCN PAM
uaccccugggucugagauuu

SEQ ID NO: 34615 - RNA, 20 nt, Artificial Sequence
  HTT spacer sequence TTCN PAM
aaauaaaucucagacccagg

SEQ ID NO: 34616 - RNA, 20 nt, Artificial Sequence
  HTT spacer sequence TTCN PAM
caaacauugaucaguuacag

SEQ ID NO: 34617 - RNA, 20 nt, Artificial Sequence
  HTT spacer sequence TTCN PAM
acucucaaacagcaacuuca

SEQ ID NO: 34618 - RNA, 20 nt, Artificial Sequence
  HTT spacer sequence TTCN PAM
gcuuaugucaugguuucaac

SEQ ID NO: 34619 - RNA, 20 nt, Artificial Sequence
  HTT spacer sequence TTCN PAM
auuucugcuuaugucauggu

SEQ ID NO: 34620 - RNA, 20 nt, Artificial Sequence
  HTT spacer sequence TTCN PAM
uuccauuucugcuuauguca

SEQ ID NO: 34621 - RNA, 20 nt, Artificial Sequence
  HTT spacer sequence TTCN PAM
uccuuccauuucugcuuaug

SEQ ID NO: 34622 - RNA, 20 nt, Artificial Sequence
  HTT spacer sequence TTCN PAM
uucuuccuuccauuucugcu

SEQ ID NO: 34623 - RNA, 20 nt, Artificial Sequence
  HTT spacer sequence TTCN PAM
cauaacugguucuuucuucc

SEQ ID NO: 34624 - RNA, 20 nt, Artificial Sequence
  HTT spacer sequence TTCN PAM
uaaucaauguucuugagagg

SEQ ID NO: 34625 - RNA, 20 nt, Artificial Sequence
  HTT spacer sequence TTCN PAM
ugagaggugugggaaaaaug

SEQ ID NO: 34626 - RNA, 20 nt, Artificial Sequence
  HTT spacer sequence TTCN PAM
cacaccucucaagaacauug

SEQ ID NO: 34627 - RNA, 20 nt, Artificial Sequence
  HTT spacer sequence TTCN PAM
ggguuuaacugcaaccagga

SEQ ID NO: 34628 - RNA, 20 nt, Artificial Sequence
  HTT spacer sequence TTCN PAM
acacacaauguucuggguuu

SEQ ID NO: 34629 - RNA, 20 nt, Artificial Sequence
  HTT spacer sequence TTCN PAM
caaaccgucaagacgcgggu

SEQ ID NO: 34630 - RNA, 20 nt, Artificial Sequence
  HTT spacer sequence TTCN PAM
agaacugugucaugagucuc

SEQ ID NO: 34631 - RNA, 20 nt, Artificial Sequence
  HTT spacer sequence TTCN PAM
ggaacacaagguccaaggca

SEQ ID NO: 34632 - RNA, 20 nt, Artificial Sequence
  HTT spacer sequence TTCN PAM
ucagagucagcacaucgaug

SEQ ID NO: 34633 - RNA, 20 nt, Artificial Sequence
  HTT spacer sequence TTCN PAM
uauuggcuggugaggacaga

SEQ ID NO: 34634 - RNA, 20 nt, Artificial Sequence
  HTT spacer sequence TTCN PAM
ggaaacccuugcagagauug

SEQ ID NO: 34635 - RNA, 20 nt, Artificial Sequence
  HTT spacer sequence TTCN PAM
agaagcucuguccucaccag

SEQ ID NO: 34636 - RNA, 20 nt, Artificial Sequence
  HTT spacer sequence TTCN PAM
gguaagugagucacauccau

SEQ ID NO: 34637 - RNA, 20 nt, Artificial Sequence
  HTT spacer sequence TTCN PAM
ugaacuaagcucaauugaaa

SEQ ID NO: 34638 - RNA, 20 nt, Artificial Sequence
  HTT spacer sequence TTCN PAM
ugaaaucuaauggaugugac

SEQ ID NO: 34639 - RNA, 20 nt, Artificial Sequence
  HTT spacer sequence TTCN PAM
auugagcuuaguucaugaaa

SEQ ID NO: 34640 - RNA, 20 nt, Artificial Sequence
  HTT spacer sequence TTCN PAM
gggaucacuugaugcaagga

SEQ ID NO: 34641 - RNA, 20 nt, Artificial Sequence
  HTT spacer sequence TTCN PAM
uugcaucaagugaucccaga

SEQ ID NO: 34642 - RNA, 20 nt, Artificial Sequence
  HTT spacer sequence TTCN PAM
gauggacaggguacuugaua

SEQ ID NO: 34643 - RNA, 20 nt, Artificial Sequence
  HTT spacer sequence TTCN PAM
ccucccaguggcuuuuugcu

SEQ ID NO: 34644 - RNA, 20 nt, Artificial Sequence
  HTT spacer sequence TTCN PAM
gcaaaaagccacugggagga

SEQ ID NO: 34645 - RNA, 20 nt, Artificial Sequence
  HTT spacer sequence TTCN PAM
aagcauagggcaaaguucag

SEQ ID NO: 34646 - RNA, 20 nt, Artificial Sequence
  HTT spacer sequence TTCN PAM
agccugggcgacagagcaag

SEQ ID NO: 34647 - RNA, 20 nt, Artificial Sequence
  HTT spacer sequence TTCN PAM
gugagcuaugauugugcuac

SEQ ID NO: 34648 - RNA, 20 nt, Artificial Sequence
  HTT spacer sequence TTCN PAM
aagcuucagugagcuaugau

SEQ ID NO: 34649 - RNA, 20 nt, Artificial Sequence
  HTT spacer sequence TTCN PAM
ccuagcuaaucgggaggcug

SEQ ID NO: 34650 - RNA, 20 nt, Artificial Sequence
  HTT spacer sequence TTCN PAM
acaaaaaauauuagccagug

SEQ ID NO: 34651 - RNA, 20 nt, Artificial Sequence
  HTT spacer sequence TTCN PAM
aggccaggcacaguggcuca

SEQ ID NO: 34652 - RNA, 20 nt, Artificial Sequence
  HTT spacer sequence TTCN PAM
acuuauauuuuaaaauucua

SEQ ID NO: 34653 - RNA, 20 nt, Artificial Sequence
  HTT spacer sequence TTCN PAM
ggauagugggaauaaaagag

SEQ ID NO: 34654 - RNA, 20 nt, Artificial Sequence
  HTT spacer sequence TTCN PAM
cacuauccagaauacuuaaa

SEQ ID NO: 34655 - RNA, 20 nt, Artificial Sequence
  HTT spacer sequence TTCN PAM
aagcucuuuuauucccacua

SEQ ID NO: 34656 - RNA, 20 nt, Artificial Sequence
  HTT spacer sequence TTCN PAM
ucuuugucuuaaacuuuuaa

SEQ ID NO: 34657 - RNA, 20 nt, Artificial Sequence
  HTT spacer sequence TTCN PAM
gcuuguuuaaaaagaauaua

SEQ ID NO: 34658 - RNA, 20 nt, Artificial Sequence
  HTT spacer sequence TTCN PAM
uuuuaaacaagcagaauuaa

SEQ ID NO: 34659 - RNA, 20 nt, Artificial Sequence
  HTT spacer sequence TTCN PAM
uuauacugaaccuagguaag

SEQ ID NO: 34660 - RNA, 20 nt, Artificial Sequence
  HTT spacer sequence TTCN PAM
guauaaugaagaguauauuc

SEQ ID NO: 34661 - RNA, 20 nt, Artificial Sequence
  HTT spacer sequence TTCN PAM
gccuggcaacagagugagac

SEQ ID NO: 34662 - RNA, 20 nt, Artificial Sequence
  HTT spacer sequence TTCN PAM
uuuucuaagaguaguuuugg

SEQ ID NO: 34663 - RNA, 20 nt, Artificial Sequence
  HTT spacer sequence TTCN PAM
aagaguaguuuuggcuggag

SEQ ID NO: 34664 - RNA, 20 nt, Artificial Sequence
  HTT spacer sequence TTCN PAM
ccagccaaaacuacucuuag

SEQ ID NO: 34665 - RNA, 20 nt, Artificial Sequence
  HTT spacer sequence TTCN PAM
uucaguacuuucuuuuagaa

SEQ ID NO: 34666 - RNA, 20 nt, Artificial Sequence
  HTT spacer sequence TTCN PAM
guacuuucuuuuagaaggga

SEQ ID NO: 34667 - RNA, 20 nt, Artificial Sequence
  HTT spacer sequence TTCN PAM
uuuagaagggaaauuuuccu

SEQ ID NO: 34668 - RNA, 20 nt, Artificial Sequence
  HTT spacer sequence TTCN PAM
aaaagaaaguacugaaagaa

SEQ ID NO: 34669 - RNA, 20 nt, Artificial Sequence
  HTT spacer sequence TTCN PAM
cuucuaaaagaaaguacuga

SEQ ID NO: 34670 - RNA, 20 nt, Artificial Sequence
  HTT spacer sequence TTCN PAM
uuuauaauuuaggguuuguu

SEQ ID NO: 34671 - RNA, 20 nt, Artificial Sequence
  HTT spacer sequence TTCN PAM
aagccaccuuuuauagagcc

SEQ ID NO: 34672 - RNA, 20 nt, Artificial Sequence
  HTT spacer sequence TTCN PAM
uuuaauccuuagaauguuua

SEQ ID NO: 34673 - RNA, 20 nt, Artificial Sequence
  HTT spacer sequence TTCN PAM
aaggauuaaaugaaauaacc

SEQ ID NO: 34674 - RNA, 20 nt, Artificial Sequence
  HTT spacer sequence TTCN PAM
cggcuccacccacagauagg

SEQ ID NO: 34675 - RNA, 20 nt, Artificial Sequence
  HTT spacer sequence TTCN PAM
guggcuugagccaauuuuau

SEQ ID NO: 34676 - RNA, 20 nt, Artificial Sequence
  HTT spacer sequence TTCN PAM
aaagacucuguaagugcccu

SEQ ID NO: 34677 - RNA, 20 nt, Artificial Sequence
  HTT spacer sequence TTCN PAM
aaauaaauacuauuucaaaa

SEQ ID NO: 34678 - RNA, 20 nt, Artificial Sequence
  HTT spacer sequence TTCN PAM
ucaaaauaaauacuauuuca

SEQ ID NO: 34679 - RNA, 20 nt, Artificial Sequence
  HTT spacer sequence TTCN PAM
uuuucuucaaaauaaauacu

SEQ ID NO: 34680 - RNA, 20 nt, Artificial Sequence
  HTT spacer sequence TTCN PAM
agacucaauaagacaguacu

SEQ ID NO: 34681 - RNA, 20 nt, Artificial Sequence
  HTT spacer sequence TTCN PAM
ucucacaauuccagacucaa

SEQ ID NO: 34682 - RNA, 20 nt, Artificial Sequence
  HTT spacer sequence TTCN PAM
agggcaccuggaugagccug

SEQ ID NO: 34683 - RNA, 20 nt, Artificial Sequence
  HTT spacer sequence TTCN PAM
uuguuaaaugugcucuuuug

SEQ ID NO: 34684 - RNA, 20 nt, Artificial Sequence
  HTT spacer sequence TTCN PAM
gcuuuugccuccaaaaagcu

SEQ ID NO: 34685 - RNA, 20 nt, Artificial Sequence
  HTT spacer sequence TTCN PAM
agaaggugaaagugaggcuu

SEQ ID NO: 34686 - RNA, 20 nt, Artificial Sequence
  HTT spacer sequence TTCN PAM
ugaagguaaaacagcaucuc

SEQ ID NO: 34687 - RNA, 20 nt, Artificial Sequence
  HTT spacer sequence TTCN PAM
ccuucuugaagguaaaacag

SEQ ID NO: 34688 - RNA, 20 nt, Artificial Sequence
  HTT spacer sequence TTCN PAM
uuguggaauuucucuaaaug

SEQ ID NO: 34689 - RNA, 20 nt, Artificial Sequence
  HTT spacer sequence TTCN PAM
acaaggaaagccucacuuuc

SEQ ID NO: 34690 - RNA, 20 nt, Artificial Sequence
  HTT spacer sequence TTCN PAM
cuaaaugcauucgucauguu

SEQ ID NO: 34691 - RNA, 20 nt, Artificial Sequence
  HTT spacer sequence TTCN PAM
ucauguuuuagauguuuauu

SEQ ID NO: 34692 - RNA, 20 nt, Artificial Sequence
  HTT spacer sequence TTCN PAM
caguuuauaucaugaaaguu

SEQ ID NO: 34693 - RNA, 20 nt, Artificial Sequence
  HTT spacer sequence TTCN PAM
ugauauaaacugugaaauaa

SEQ ID NO: 34694 - RNA, 20 nt, Artificial Sequence
  HTT spacer sequence TTCN PAM
uucucacuagcuuuccaaaa

SEQ ID NO: 34695 - RNA, 20 nt, Artificial Sequence
  HTT spacer sequence TTCN PAM
cacuagcuuuccaaaauauc

SEQ ID NO: 34696 - RNA, 20 nt, Artificial Sequence
  HTT spacer sequence TTCN PAM
aaaauaucuuaccuaaaauu

SEQ ID NO: 34697 - RNA, 20 nt, Artificial Sequence
  HTT spacer sequence TTCN PAM
cucuaaagcuuuuaaaacug

SEQ ID NO: 34698 - RNA, 20 nt, Artificial Sequence
  HTT spacer sequence TTCN PAM
ugcaguuuuaaaagcuuuag

SEQ ID NO: 34699 - RNA, 20 nt, Artificial Sequence
  HTT spacer sequence TTCN PAM
ucuccaagcaaauggaugac

SEQ ID NO: 34700 - RNA, 20 nt, Artificial Sequence
  HTT spacer sequence TTCN PAM
uuuuuugguugaaguacuaa

SEQ ID NO: 34701 - RNA, 20 nt, Artificial Sequence
  HTT spacer sequence TTCN PAM
accaaaaaaggaaaagagau

SEQ ID NO: 34702 - RNA, 20 nt, Artificial Sequence
  HTT spacer sequence TTCN PAM
cguaucuuuuaguacuucaa

SEQ ID NO: 34703 - RNA, 20 nt, Artificial Sequence
  HTT spacer sequence TTCN PAM
auucucguaucuuuuaguac

SEQ ID NO: 34704 - RNA, 20 nt, Artificial Sequence
  HTT spacer sequence TTCN PAM
cucucuuuccauucucguau

SEQ ID NO: 34705 - RNA, 20 nt, Artificial Sequence
  HTT spacer sequence TTCN PAM
ucccucucuuuccauucucg

SEQ ID NO: 34706 - RNA, 20 nt, Artificial Sequence
  HTT spacer sequence TTCN PAM
aaggauguagagcaguauuc

SEQ ID NO: 34707 - RNA, 20 nt, Artificial Sequence
  HTT spacer sequence TTCN PAM
ugaaucugagcucauuucag

SEQ ID NO: 34708 - RNA, 20 nt, Artificial Sequence
  HTT spacer sequence TTCN PAM
ggaauacugcucuacauccu

SEQ ID NO: 34709 - RNA, 20 nt, Artificial Sequence
  HTT spacer sequence TTCN PAM
gccauucuauucuuaaacua

SEQ ID NO: 34710 - RNA, 20 nt, Artificial Sequence
  HTT spacer sequence TTCN PAM
auucuuaaacuauaaugaaa

SEQ ID NO: 34711 - RNA, 20 nt, Artificial Sequence
  HTT spacer sequence TTCN PAM
uaaacuauaaugaaaaaaaa

SEQ ID NO: 34712 - RNA, 20 nt, Artificial Sequence
  HTT spacer sequence TTCN PAM
uuauaguuuaagaauagaau

SEQ ID NO: 34713 - RNA, 20 nt, Artificial Sequence
  HTT spacer sequence TTCN PAM
uuguaaaaauuuuggacuau

SEQ ID NO: 34714 - RNA, 20 nt, Artificial Sequence
  HTT spacer sequence TTCN PAM
cuauaguccaaaauuuuuac

SEQ ID NO: 34715 - RNA, 20 nt, Artificial Sequence
  HTT spacer sequence TTCN PAM
uaguacuauucucuauaguc

SEQ ID NO: 34716 - RNA, 20 nt, Artificial Sequence
  HTT spacer sequence TTCN PAM
ucuuaguacuauucucuaua

SEQ ID NO: 34717 - RNA, 20 nt, Artificial Sequence
  HTT spacer sequence TTCN PAM
auucugcugccaccuggagg

SEQ ID NO: 34718 - RNA, 20 nt, Artificial Sequence
  HTT spacer sequence TTCN PAM
gcugccaccuggagguaauc

SEQ ID NO: 34719 - RNA, 20 nt, Artificial Sequence
  HTT spacer sequence TTCN PAM
uguucaaaaucaggucaaaa

SEQ ID NO: 34720 - RNA, 20 nt, Artificial Sequence
  HTT spacer sequence TTCN PAM
aaaucaggucaaaauuacau

SEQ ID NO: 34721 - RNA, 20 nt, Artificial Sequence
  HTT spacer sequence TTCN PAM
acuuaauauuuuauuagcau

SEQ ID NO: 34722 - RNA, 20 nt, Artificial Sequence
  HTT spacer sequence TTCN PAM
uguuaugaaacaguaauuuu

SEQ ID NO: 34723 - RNA, 20 nt, Artificial Sequence
  HTT spacer sequence TTCN PAM
uaacaggaaaaugcuaauaa

SEQ ID NO: 34724 - RNA, 20 nt, Artificial Sequence
  HTT spacer sequence TTCN PAM
uuuucugagaauuccuggaa

SEQ ID NO: 34725 - RNA, 20 nt, Artificial Sequence
  HTT spacer sequence TTCN PAM
gagaauuccuggaaguugag

SEQ ID NO: 34726 - RNA, 20 nt, Artificial Sequence
  HTT spacer sequence TTCN PAM
cagaaaaagaaaacuauaca

SEQ ID NO: 34727 - RNA, 20 nt, Artificial Sequence
  HTT spacer sequence TTCN PAM
uggaaguugaguuaccaggc

SEQ ID NO: 34728 - RNA, 20 nt, Artificial Sequence
  HTT spacer sequence TTCN PAM
aggaauucucagaaaaagaa

SEQ ID NO: 34729 - RNA, 20 nt, Artificial Sequence
  HTT spacer sequence TTCN PAM
aagccgggccugguaacuca

SEQ ID NO: 34730 - RNA, 20 nt, Artificial Sequence
  HTT spacer sequence TTCN PAM
agcgauucuccugccucagc

SEQ ID NO: 34731 - RNA, 20 nt, Artificial Sequence
  HTT spacer sequence TTCN PAM
ccugccucagccucccgagu

SEQ ID NO: 34732 - RNA, 20 nt, Artificial Sequence
  HTT spacer sequence TTCN PAM
cgauauuggccaggcugguc

SEQ ID NO: 34733 - RNA, 20 nt, Artificial Sequence
  HTT spacer sequence TTCN PAM
agaccagccuggccaauauc

SEQ ID NO: 34734 - RNA, 20 nt, Artificial Sequence
  HTT spacer sequence TTCN PAM
gaccccgugauccaccugca

SEQ ID NO: 34735 - RNA, 20 nt, Artificial Sequence
  HTT spacer sequence TTCN PAM
aauagcuuuauggagguuau

SEQ ID NO: 34736 - RNA, 20 nt, Artificial Sequence
  HTT spacer sequence TTCN PAM
ugaaauguacucacuuugag

SEQ ID NO: 34737 - RNA, 20 nt, Artificial Sequence
  HTT spacer sequence TTCN PAM
agaaauguaaauuauaaccu

SEQ ID NO: 34738 - RNA, 20 nt, Artificial Sequence
  HTT spacer sequence TTCN PAM
gucaccccaaauguauccuu

SEQ ID NO: 34739 - RNA, 20 nt, Artificial Sequence
  HTT spacer sequence TTCN PAM
ugccccaacuccuaggcagc

SEQ ID NO: 34740 - RNA, 20 nt, Artificial Sequence
  HTT spacer sequence TTCN PAM
gucccuuaagauuuguguuu

SEQ ID NO: 34741 - RNA, 20 nt, Artificial Sequence
  HTT spacer sequence TTCN PAM
ccaggcgcucaugccuguaa

SEQ ID NO: 34742 - RNA, 20 nt, Artificial Sequence
  HTT spacer sequence TTCN PAM
agaccagccuggccaacaug

SEQ ID NO: 34743 - RNA, 20 nt, Artificial Sequence
  HTT spacer sequence TTCN PAM
ccauguuggccaggcugguc

SEQ ID NO: 34744 - RNA, 20 nt, Artificial Sequence
  HTT spacer sequence TTCN PAM
ccugccucagccucccgagu

SEQ ID NO: 34745 - RNA, 20 nt, Artificial Sequence
  HTT spacer sequence TTCN PAM
agugauucuccugccucagc

SEQ ID NO: 34746 - RNA, 20 nt, Artificial Sequence
  HTT spacer sequence TTCN PAM
aaccugggcaacagagagag

SEQ ID NO: 34747 - RNA, 20 nt, Artificial Sequence
  HTT spacer sequence TTCN PAM
ggacauuuuauaguacuggg

SEQ ID NO: 34748 - RNA, 20 nt, Artificial Sequence
  HTT spacer sequence TTCN PAM
uuuacuuaauugugagauug

SEQ ID NO: 34749 - RNA, 20 nt, Artificial Sequence
  HTT spacer sequence TTCN PAM
uguuguagcauguaucagua

SEQ ID NO: 34750 - RNA, 20 nt, Artificial Sequence
  HTT spacer sequence TTCN PAM
uuuuuauuggcgaaaguauu

SEQ ID NO: 34751 - RNA, 20 nt, Artificial Sequence
  HTT spacer sequence TTCN PAM
ccaauaaaaaugaacaaacu

SEQ ID NO: 34752 - RNA, 20 nt, Artificial Sequence
  HTT spacer sequence TTCN PAM
auuauaugaauaauaccaua

SEQ ID NO: 34753 - RNA, 20 nt, Artificial Sequence
  HTT spacer sequence TTCN PAM
uauaauagaauacuuucgcc

SEQ ID NO: 34754 - RNA, 20 nt, Artificial Sequence
  HTT spacer sequence TTCN PAM
uguuuuggcuaauuuaugaa

SEQ ID NO: 34755 - RNA, 20 nt, Artificial Sequence
  HTT spacer sequence TTCN PAM
uaaauuagccaaaacaugaa

SEQ ID NO: 34756 - RNA, 20 nt, Artificial Sequence
  HTT spacer sequence TTCN PAM
caguaccauaauucauaaau

SEQ ID NO: 34757 - RNA, 20 nt, Artificial Sequence
  HTT spacer sequence TTCN PAM
uuucucuugaguagaucacc

SEQ ID NO: 34758 - RNA, 20 nt, Artificial Sequence
  HTT spacer sequence TTCN PAM
cuugaguagaucaccuagaa

SEQ ID NO: 34759 - RNA, 20 nt, Artificial Sequence
  HTT spacer sequence TTCN PAM
aggugaucuacucaagagaa

SEQ ID NO: 34760 - RNA, 20 nt, Artificial Sequence
  HTT spacer sequence TTCN PAM
caguaaguaccaaaauuauu

SEQ ID NO: 34761 - RNA, 20 nt, Artificial Sequence
  HTT spacer sequence TTCN PAM
aaaacauaccauuguuccuu

SEQ ID NO: 34762 - RNA, 20 nt, Artificial Sequence
  HTT spacer sequence TTCN PAM
uuccuuccuuccuuccuucc

SEQ ID NO: 34763 - RNA, 20 nt, Artificial Sequence
  HTT spacer sequence TTCN PAM
uuccuuccuuccuuccuucc

SEQ ID NO: 34764 - RNA, 20 nt, Artificial Sequence
  HTT spacer sequence TTCN PAM
uuccuuccuuccuuccuucc

SEQ ID NO: 34765 - RNA, 20 nt, Artificial Sequence
  HTT spacer sequence TTCN PAM
uuccuuccuuccuuccuucu

SEQ ID NO: 34766 - RNA, 20 nt, Artificial Sequence
  HTT spacer sequence TTCN PAM
uuccuuccuuccuucuuucc

SEQ ID NO: 34767 - RNA, 20 nt, Artificial Sequence
  HTT spacer sequence TTCN PAM
uuccuuccuucuuuccuucc

SEQ ID NO: 34768 - RNA, 20 nt, Artificial Sequence
  HTT spacer sequence TTCN PAM
uuccuucuuuccuuccuccc

SEQ ID NO: 34769 - RNA, 20 nt, Artificial Sequence
  HTT spacer sequence TTCN PAM
uucuuuccuuccucccuucc

SEQ ID NO: 34770 - RNA, 20 nt, Artificial Sequence
  HTT spacer sequence TTCN PAM
uuccuuccucccuuccuccc

SEQ ID NO: 34771 - RNA, 20 nt, Artificial Sequence
  HTT spacer sequence TTCN PAM
uuccucccuuccucccuccc

SEQ ID NO: 34772 - RNA, 20 nt, Artificial Sequence
  HTT spacer sequence TTCN PAM
ucccuuccucccucccuucc

SEQ ID NO: 34773 - RNA, 20 nt, Artificial Sequence
  HTT spacer sequence TTCN PAM
ucccucccuucccuacuucc

SEQ ID NO: 34774 - RNA, 20 nt, Artificial Sequence
  HTT spacer sequence TTCN PAM
cuacuucccucucccuuucc

SEQ ID NO: 34775 - RNA, 20 nt, Artificial Sequence
  HTT spacer sequence TTCN PAM
cucucccuuucccuuucccu

SEQ ID NO: 34776 - RNA, 20 nt, Artificial Sequence
  HTT spacer sequence TTCN PAM
cuuucccuuccccuuuuccc

SEQ ID NO: 34777 - RNA, 20 nt, Artificial Sequence
  HTT spacer sequence TTCN PAM
cuuccccuuuucccuucccc

SEQ ID NO: 34778 - RNA, 20 nt, Artificial Sequence
  HTT spacer sequence TTCN PAM
ccuuuucccuuccccuuccc

SEQ ID NO: 34779 - RNA, 20 nt, Artificial Sequence
  HTT spacer sequence TTCN PAM
cuuccccuucccgccugccu

SEQ ID NO: 34780 - RNA, 20 nt, Artificial Sequence
  HTT spacer sequence TTCN PAM
ccuucccgccugccugccug

SEQ ID NO: 34781 - RNA, 20 nt, Artificial Sequence
  HTT spacer sequence TTCN PAM
cgccugccugccugccugcc

SEQ ID NO: 34782 - RNA, 20 nt, Artificial Sequence
  HTT spacer sequence TTCN PAM
uuccuuccuuccuucguuuc

SEQ ID NO: 34783 - RNA, 20 nt, Artificial Sequence
  HTT spacer sequence TTCN PAM
uuccuuccuucguuucuuuc

SEQ ID NO: 34784 - RNA, 20 nt, Artificial Sequence
  HTT spacer sequence TTCN PAM
uuccuucguuucuuucuaca

SEQ ID NO: 34785 - RNA, 20 nt, Artificial Sequence
  HTT spacer sequence TTCN PAM
uucguuucuuucuacauaua

SEQ ID NO: 34786 - RNA, 20 nt, Artificial Sequence
  HTT spacer sequence TTCN PAM
uuucuuucuacauauacaca

SEQ ID NO: 34787 - RNA, 20 nt, Artificial Sequence
  HTT spacer sequence TTCN PAM
uucuacauauacacauuuuu

SEQ ID NO: 34788 - RNA, 20 nt, Artificial Sequence
  HTT spacer sequence TTCN PAM
acauauacacauuuuuuuaa

SEQ ID NO: 34789 - RNA, 20 nt, Artificial Sequence
  HTT spacer sequence TTCN PAM
augguuuuugggguacaagu

SEQ ID NO: 34790 - RNA, 20 nt, Artificial Sequence
  HTT spacer sequence TTCN PAM
gccauguaaccaaaaaccac

SEQ ID NO: 34791 - RNA, 20 nt, Artificial Sequence
  HTT spacer sequence TTCN PAM
ccauguaaccaaaauucagc

SEQ ID NO: 34792 - RNA, 20 nt, Artificial Sequence
  HTT spacer sequence TTCN PAM
agccuuccgccuugugaguc

SEQ ID NO: 34793 - RNA, 20 nt, Artificial Sequence
  HTT spacer sequence TTCN PAM
gccuugugagucuccaaugu

SEQ ID NO: 34794 - RNA, 20 nt, Artificial Sequence
  HTT spacer sequence TTCN PAM
gagaacauauagcagaaaca

SEQ ID NO: 34795 - RNA, 20 nt, Artificial Sequence
  HTT spacer sequence TTCN PAM
cagaagugggagcugagcug

SEQ ID NO: 34796 - RNA, 20 nt, Artificial Sequence
  HTT spacer sequence TTCN PAM
gcuauauguucucagaagug

SEQ ID NO: 34797 - RNA, 20 nt, Artificial Sequence
  HTT spacer sequence TTCN PAM
gguagugggaguauacuuug

SEQ ID NO: 34798 - RNA, 20 nt, Artificial Sequence
  HTT spacer sequence TTCN PAM
ucucaccaguacaaauauuu

SEQ ID NO: 34799 - RNA, 20 nt, Artificial Sequence
  HTT spacer sequence TTCN PAM
caccaguacaaauauuucaa

SEQ ID NO: 34800 - RNA, 20 nt, Artificial Sequence
  HTT spacer sequence TTCN PAM
aaaaaaguuaaauauguauc

SEQ ID NO: 34801 - RNA, 20 nt, Artificial Sequence
  HTT spacer sequence TTCN PAM
gcccaaaaaacugauacaua

SEQ ID NO: 34802 - RNA, 20 nt, Artificial Sequence
  HTT spacer sequence TTCN PAM
cuuuauuuauuuauuuuuuu

SEQ ID NO: 34803 - RNA, 20 nt, Artificial Sequence
  HTT spacer sequence TTCN PAM
augaugcccaggcuggagug

SEQ ID NO: 34804 - RNA, 20 nt, Artificial Sequence
  HTT spacer sequence TTCN PAM
agugauucccacgucagccu

SEQ ID NO: 34805 - RNA, 20 nt, Artificial Sequence
  HTT spacer sequence TTCN PAM
cacgucagccucccaggaag

SEQ ID NO: 34806 - RNA, 20 nt, Artificial Sequence
  HTT spacer sequence TTCN PAM
ugggaggcugacgugggaau

SEQ ID NO: 34807 - RNA, 20 nt, Artificial Sequence
  HTT spacer sequence TTCN PAM
agcuuccugggaggcugacg

SEQ ID NO: 34808 - RNA, 20 nt, Artificial Sequence
  HTT spacer sequence TTCN PAM
ccauguuggccagacugguc

SEQ ID NO: 34809 - RNA, 20 nt, Artificial Sequence
  HTT spacer sequence TTCN PAM
aaagugcugggauuacaggc

SEQ ID NO: 34810 - RNA, 20 nt, Artificial Sequence
  HTT spacer sequence TTCN PAM
uuuuaaaauaacuuaccuuc

SEQ ID NO: 34811 - RNA, 20 nt, Artificial Sequence
  HTT spacer sequence TTCN PAM
uuugaaaguaauacauguuu

SEQ ID NO: 34812 - RNA, 20 nt, Artificial Sequence
  HTT spacer sequence TTCN PAM
aaagaagguaaguuauuuua

SEQ ID NO: 34813 - RNA, 20 nt, Artificial Sequence
  HTT spacer sequence TTCN PAM
uuaaacauguauuacuuuca

SEQ ID NO: 34814 - RNA, 20 nt, Artificial Sequence
  HTT spacer sequence TTCN PAM
guucauuaaacauguauuac

SEQ ID NO: 34815 - RNA, 20 nt, Artificial Sequence
  HTT spacer sequence TTCN PAM
uuaaauucuguucauuaaac

SEQ ID NO: 34816 - RNA, 20 nt, Artificial Sequence
  HTT spacer sequence TTCN PAM
uuuuuuuauauuuuccuuaa

SEQ ID NO: 34817 - RNA, 20 nt, Artificial Sequence
  HTT spacer sequence TTCN PAM
guaguuugauuacaaagauu

SEQ ID NO: 34818 - RNA, 20 nt, Artificial Sequence
  HTT spacer sequence TTCN PAM
uuucaguaguuugauuacaa

SEQ ID NO: 34819 - RNA, 20 nt, Artificial Sequence
  HTT spacer sequence TTCN PAM
uuuucauuuucaucauugua

SEQ ID NO: 34820 - RNA, 20 nt, Artificial Sequence
  HTT spacer sequence TTCN PAM
uuuucaucauuguaauuugc

SEQ ID NO: 34821 - RNA, 20 nt, Artificial Sequence
  HTT spacer sequence TTCN PAM
ucauuguaauuugcauuucu

SEQ ID NO: 34822 - RNA, 20 nt, Artificial Sequence
  HTT spacer sequence TTCN PAM
uugauuacuugugagacacu

SEQ ID NO: 34823 - RNA, 20 nt, Artificial Sequence
  HTT spacer sequence TTCN PAM
uuuacuuaauagguuuauau

SEQ ID NO: 34824 - RNA, 20 nt, Artificial Sequence
  HTT spacer sequence TTCN PAM
gagauuuugcagcuuuacca

SEQ ID NO: 34825 - RNA, 20 nt, Artificial Sequence
  HTT spacer sequence TTCN PAM
gcaaaugauagcaacuucuu

SEQ ID NO: 34826 - RNA, 20 nt, Artificial Sequence
  HTT spacer sequence TTCN PAM
uuuuguuuguuuguuugugg

SEQ ID NO: 34827 - RNA, 20 nt, Artificial Sequence
  HTT spacer sequence TTCN PAM
ugccugagugacagagcgag

SEQ ID NO: 34828 - RNA, 20 nt, Artificial Sequence
  HTT spacer sequence TTCN PAM
accacugcauuccugccuga

SEQ ID NO: 34829 - RNA, 20 nt, Artificial Sequence
  HTT spacer sequence TTCN PAM
agcgauuuuccugccucagc

SEQ ID NO: 34830 - RNA, 20 nt, Artificial Sequence
  HTT spacer sequence TTCN PAM
ugccucagccucccaaguag

SEQ ID NO: 34831 - RNA, 20 nt, Artificial Sequence
  HTT spacer sequence TTCN PAM
agaucagcccggccaacaug

SEQ ID NO: 34832 - RNA, 20 nt, Artificial Sequence
  HTT spacer sequence TTCN PAM
uauauucuagaaaaaauucu

SEQ ID NO: 34833 - RNA, 20 nt, Artificial Sequence
  HTT spacer sequence TTCN PAM
agaaaaaauucuacucauga

SEQ ID NO: 34834 - RNA, 20 nt, Artificial Sequence
  HTT spacer sequence TTCN PAM
agaauauaagaaguaacuac

SEQ ID NO: 34835 - RNA, 20 nt, Artificial Sequence
  HTT spacer sequence TTCN PAM
acucaugaucaagucuccau

SEQ ID NO: 34836 - RNA, 20 nt, Artificial Sequence
  HTT spacer sequence TTCN PAM
ucauggagacuugaucauga

SEQ ID NO: 34837 - RNA, 20 nt, Artificial Sequence
  HTT spacer sequence TTCN PAM
auuaaagucucuuuccucau

SEQ ID NO: 34838 - RNA, 20 nt, Artificial Sequence
  HTT spacer sequence TTCN PAM
uuguuucuaaaaguauuacu

SEQ ID NO: 34839 - RNA, 20 nt, Artificial Sequence
  HTT spacer sequence TTCN PAM
aaaaguauuacugaguguug

SEQ ID NO: 34840 - RNA, 20 nt, Artificial Sequence
  HTT spacer sequence TTCN PAM
uaucugccaucaacacucag

SEQ ID NO: 34841 - RNA, 20 nt, Artificial Sequence
  HTT spacer sequence TTCN PAM
uacaaaaacaaaaggguuca

SEQ ID NO: 34842 - RNA, 20 nt, Artificial Sequence
  HTT spacer sequence TTCN PAM
ccauuugaauucaguuuaga

SEQ ID NO: 34843 - RNA, 20 nt, Artificial Sequence
  HTT spacer sequence TTCN PAM
aauggagaauacggguaaca

SEQ ID NO: 34844 - RNA, 20 nt, Artificial Sequence
  HTT spacer sequence TTCN PAM
guuuagauuuguuaggaauc

SEQ ID NO: 34845 - RNA, 20 nt, Artificial Sequence
  HTT spacer sequence TTCN PAM
uaacaaaucuaaacugaauu

SEQ ID NO: 34846 - RNA, 20 nt, Artificial Sequence
  HTT spacer sequence TTCN PAM
uuaggcacuuuugcaauuuu

SEQ ID NO: 34847 - RNA, 20 nt, Artificial Sequence
  HTT spacer sequence TTCN PAM
gaccugcucugugcucagua

SEQ ID NO: 34848 - RNA, 20 nt, Artificial Sequence
  HTT spacer sequence TTCN PAM
gcacuuguugaucagaaggu

SEQ ID NO: 34849 - RNA, 20 nt, Artificial Sequence
  HTT spacer sequence TTCN PAM
gaucaacaagugcugaacag

SEQ ID NO: 34850 - RNA, 20 nt, Artificial Sequence
  HTT spacer sequence TTCN PAM
aaaccuucugaucaacaagu

SEQ ID NO: 34851 - RNA, 20 nt, Artificial Sequence
  HTT spacer sequence TTCN PAM
cuuucuaaaccuucugauca

SEQ ID NO: 34852 - RNA, 20 nt, Artificial Sequence
  HTT spacer sequence TTCN PAM
aaguugguuuuuaauuaaag

SEQ ID NO: 34853 - RNA, 20 nt, Artificial Sequence
  HTT spacer sequence TTCN PAM
auuuacacuauuaaaugcuu

SEQ ID NO: 34854 - RNA, 20 nt, Artificial Sequence
  HTT spacer sequence TTCN PAM
uuugucugucauaaaauuua

SEQ ID NO: 34855 - RNA, 20 nt, Artificial Sequence
  HTT spacer sequence TTCN PAM
agaguucaagaacagccugg

SEQ ID NO: 34856 - RNA, 20 nt, Artificial Sequence
  HTT spacer sequence TTCN PAM
agaacagccuggccaaggug

SEQ ID NO: 34857 - RNA, 20 nt, Artificial Sequence
  HTT spacer sequence TTCN PAM
ugaacucuugaacuccugac

SEQ ID NO: 34858 - RNA, 20 nt, Artificial Sequence
  HTT spacer sequence TTCN PAM
ucaccuuggccaggcuguuc

SEQ ID NO: 34859 - RNA, 20 nt, Artificial Sequence
  HTT spacer sequence TTCN PAM
ccugccucagccuccugagu

SEQ ID NO: 34860 - RNA, 20 nt, Artificial Sequence
  HTT spacer sequence TTCN PAM
agugauucuccugccucagc

SEQ ID NO: 34861 - RNA, 20 nt, Artificial Sequence
  HTT spacer sequence TTCN PAM
gucucaaaaaaaaaaaaaaa

SEQ ID NO: 34862 - RNA, 20 nt, Artificial Sequence
  HTT spacer sequence TTCN PAM
uuuuuuuuuuuuuuugagac

SEQ ID NO: 34863 - RNA, 20 nt, Artificial Sequence
  HTT spacer sequence TTCN PAM
uuuuuucuuuuuuuuuuuuu

SEQ ID NO: 34864 - RNA, 20 nt, Artificial Sequence
  HTT spacer sequence TTCN PAM
agcacgugacagcguugucu

SEQ ID NO: 34865 - RNA, 20 nt, Artificial Sequence
  HTT spacer sequence TTCN PAM
ucaagcacgugacagcguug

SEQ ID NO: 34866 - RNA, 20 nt, Artificial Sequence
  HTT spacer sequence TTCN PAM
cagguggcguucuucaagca

SEQ ID NO: 34867 - RNA, 20 nt, Artificial Sequence
  HTT spacer sequence TTCN PAM
cgcccccuuucucagguggc

SEQ ID NO: 34868 - RNA, 20 nt, Artificial Sequence
  HTT spacer sequence TTCN PAM
ucuacuuucuuaagcaaauu

SEQ ID NO: 34869 - RNA, 20 nt, Artificial Sequence
  HTT spacer sequence TTCN PAM
uaagcaaauuaaccuuacuu

SEQ ID NO: 34870 - RNA, 20 nt, Artificial Sequence
  HTT spacer sequence TTCN PAM
gguaaacacugcuuugaucu

SEQ ID NO: 34871 - RNA, 20 nt, Artificial Sequence
  HTT spacer sequence TTCN PAM
caugcaugagacgcagccuc

SEQ ID NO: 34872 - RNA, 20 nt, Artificial Sequence
  HTT spacer sequence TTCN PAM
ccgucagcacaauaaccagg

SEQ ID NO: 34873 - RNA, 20 nt, Artificial Sequence
  HTT spacer sequence TTCN PAM
cauugucgggaaaaugcccu

SEQ ID NO: 34874 - RNA, 20 nt, Artificial Sequence
  HTT spacer sequence TTCN PAM
cgacaaugugaagaugccac

SEQ ID NO: 34875 - RNA, 20 nt, Artificial Sequence
  HTT spacer sequence TTCN PAM
ugaugccuuucuuuaggcuu

SEQ ID NO: 34876 - RNA, 20 nt, Artificial Sequence
  HTT spacer sequence TTCN PAM
uuaggcuuuaauugaaaaca

SEQ ID NO: 34877 - RNA, 20 nt, Artificial Sequence
  HTT spacer sequence TTCN PAM
auuaaagccuaaagaaaggc

SEQ ID NO: 34878 - RNA, 20 nt, Artificial Sequence
  HTT spacer sequence TTCN PAM
agaaaaaagcuucagcucag

SEQ ID NO: 34879 - RNA, 20 nt, Artificial Sequence
  HTT spacer sequence TTCN PAM
agaaaauaaaauguuuucaa

SEQ ID NO: 34880 - RNA, 20 nt, Artificial Sequence
  HTT spacer sequence TTCN PAM
gcucaggauguuugagugua

SEQ ID NO: 34881 - RNA, 20 nt, Artificial Sequence
  HTT spacer sequence TTCN PAM
augugcugacaguuguauuu

SEQ ID NO: 34882 - RNA, 20 nt, Artificial Sequence
  HTT spacer sequence TTCN PAM
cuuuaguuguguuaccuuua

SEQ ID NO: 34883 - RNA, 20 nt, Artificial Sequence
  HTT spacer sequence TTCN PAM
aucaugccuguugauuuuuu

SEQ ID NO: 34884 - RNA, 20 nt, Artificial Sequence
  HTT spacer sequence TTCN PAM
gugauuugcgagauuaucau

SEQ ID NO: 34885 - RNA, 20 nt, Artificial Sequence
  HTT spacer sequence TTCN PAM
cauuuauuguggagcuuuug

SEQ ID NO: 34886 - RNA, 20 nt, Artificial Sequence
  HTT spacer sequence TTCN PAM
aaagcuccacaauaaaugug

SEQ ID NO: 34887 - RNA, 20 nt, Artificial Sequence
  HTT spacer sequence TTCN PAM
uaucugcuucuuaggugagu

SEQ ID NO: 34888 - RNA, 20 nt, Artificial Sequence
  HTT spacer sequence TTCN PAM
uaggugagugggacacagug

SEQ ID NO: 34889 - RNA, 20 nt, Artificial Sequence
  HTT spacer sequence TTCN PAM
uuaaagcacugugucccacu

SEQ ID NO: 34890 - RNA, 20 nt, Artificial Sequence
  HTT spacer sequence TTCN PAM
gaauucuagcuugcagagaa

SEQ ID NO: 34891 - RNA, 20 nt, Artificial Sequence
  HTT spacer sequence TTCN PAM
gaagauuauagcuucauuaa

SEQ ID NO: 34892 - RNA, 20 nt, Artificial Sequence
  HTT spacer sequence TTCN PAM
agcuugcagagaagauugca

SEQ ID NO: 34893 - RNA, 20 nt, Artificial Sequence
  HTT spacer sequence TTCN PAM
cugcaagcuagaauucugaa

SEQ ID NO: 34894 - RNA, 20 nt, Artificial Sequence
  HTT spacer sequence TTCN PAM
gcaaucuucucugcaagcua

SEQ ID NO: 34895 - RNA, 20 nt, Artificial Sequence
  HTT spacer sequence TTCN PAM
gcugaguaacaguguuuuac

SEQ ID NO: 34896 - RNA, 20 nt, Artificial Sequence
  HTT spacer sequence TTCN PAM
aagcuuaaaugaucacuuga

SEQ ID NO: 34897 - RNA, 20 nt, Artificial Sequence
  HTT spacer sequence TTCN PAM
gaauuaggaacucagcuuau

SEQ ID NO: 34898 - RNA, 20 nt, Artificial Sequence
  HTT spacer sequence TTCN PAM
gaaaaaaagcaucaagugau

SEQ ID NO: 34899 - RNA, 20 nt, Artificial Sequence
  HTT spacer sequence TTCN PAM
uaauucagaaaaaaagcauc

SEQ ID NO: 34900 - RNA, 20 nt, Artificial Sequence
  HTT spacer sequence TTCN PAM
ugaauaaauaacgucuuuuu

SEQ ID NO: 34901 - RNA, 20 nt, Artificial Sequence
  HTT spacer sequence TTCN PAM
ggaauuaugacuuugauauu

SEQ ID NO: 34902 - RNA, 20 nt, Artificial Sequence
  HTT spacer sequence TTCN PAM
uguaaagacugcuuuaaaaa

SEQ ID NO: 34903 - RNA, 20 nt, Artificial Sequence
  HTT spacer sequence TTCN PAM
auguguuuuuuaaagcaguc

SEQ ID NO: 34904 - RNA, 20 nt, Artificial Sequence
  HTT spacer sequence TTCN PAM
agaccacccagggcaacaug

SEQ ID NO: 34905 - RNA, 20 nt, Artificial Sequence
  HTT spacer sequence TTCN PAM
caucccucagccucccgagu

SEQ ID NO: 34906 - RNA, 20 nt, Artificial Sequence
  HTT spacer sequence TTCN PAM
ccucagauaauuuccuuugu

SEQ ID NO: 34907 - RNA, 20 nt, Artificial Sequence
  HTT spacer sequence TTCN PAM
uuuguuuaaacucagaacug

SEQ ID NO: 34908 - RNA, 20 nt, Artificial Sequence
  HTT spacer sequence TTCN PAM
gaguuuaaacaaaggaaauu

SEQ ID NO: 34909 - RNA, 20 nt, Artificial Sequence
  HTT spacer sequence TTCN PAM
cucuuggagaagauucagga

SEQ ID NO: 34910 - RNA, 20 nt, Artificial Sequence
  HTT spacer sequence TTCN PAM
ccaagagagaaaaugccagu

SEQ ID NO: 34911 - RNA, 20 nt, Artificial Sequence
  HTT spacer sequence TTCN PAM
ggacaaauacuccuuuaaga

SEQ ID NO: 34912 - RNA, 20 nt, Artificial Sequence
  HTT spacer sequence TTCN PAM
acuuaucuuaaaggaguauu

SEQ ID NO: 34913 - RNA, 20 nt, Artificial Sequence
  HTT spacer sequence TTCN PAM
cugcuucuacuuaucuuaaa

SEQ ID NO: 34914 - RNA, 20 nt, Artificial Sequence
  HTT spacer sequence TTCN PAM
ugauaaucaaauccucuuuc

SEQ ID NO: 34915 - RNA, 20 nt, Artificial Sequence
  HTT spacer sequence TTCN PAM
aagcuuaucaaauuccugau

SEQ ID NO: 34916 - RNA, 20 nt, Artificial Sequence
  HTT spacer sequence TTCN PAM
uaaugucauuucagaagaug

SEQ ID NO: 34917 - RNA, 20 nt, Artificial Sequence
  HTT spacer sequence TTCN PAM
gaagaugaauauuuauuaau

SEQ ID NO: 34918 - RNA, 20 nt, Artificial Sequence
  HTT spacer sequence TTCN PAM
gaaaugacauuaagaagcaa

SEQ ID NO: 34919 - RNA, 20 nt, Artificial Sequence
  HTT spacer sequence TTCN PAM
ucuucugaaaugacauuaag

SEQ ID NO: 34920 - RNA, 20 nt, Artificial Sequence
  HTT spacer sequence TTCN PAM
aaguaguaguuaguaaucaa

SEQ ID NO: 34921 - RNA, 20 nt, Artificial Sequence
  HTT spacer sequence TTCN PAM
aaacuucagcaggccucuug

SEQ ID NO: 34922 - RNA, 20 nt, Artificial Sequence
  HTT spacer sequence TTCN PAM
gcaggccucuugacaauuca

SEQ ID NO: 34923 - RNA, 20 nt, Artificial Sequence
  HTT spacer sequence TTCN PAM
gcuguggucaauugggucuu

SEQ ID NO: 34924 - RNA, 20 nt, Artificial Sequence
  HTT spacer sequence TTCN PAM
guuagcauucauguguuaac

SEQ ID NO: 34925 - RNA, 20 nt, Artificial Sequence
  HTT spacer sequence TTCN PAM
uguguuaacuuaaaaucaua

SEQ ID NO: 34926 - RNA, 20 nt, Artificial Sequence
  HTT spacer sequence TTCN PAM
aaccacugggguauuauaau

SEQ ID NO: 34927 - RNA, 20 nt, Artificial Sequence
  HTT spacer sequence TTCN PAM
uuuauaauuuauuuuauuuu

SEQ ID NO: 34928 - RNA, 20 nt, Artificial Sequence
  HTT spacer sequence TTCN PAM
auguguucuaaaggaauuag

SEQ ID NO: 34929 - RNA, 20 nt, Artificial Sequence
  HTT spacer sequence TTCN PAM
aaaggaauuagaguuuguau

SEQ ID NO: 34930 - RNA, 20 nt, Artificial Sequence
  HTT spacer sequence TTCN PAM
uuuagaacacauggaaaaaa

SEQ ID NO: 34931 - RNA, 20 nt, Artificial Sequence
  HTT spacer sequence TTCN PAM
aucccccauuauaguuauau

SEQ ID NO: 34932 - RNA, 20 nt, Artificial Sequence
  HTT spacer sequence TTCN PAM
uggcacaugucaauuucuau

SEQ ID NO: 34933 - RNA, 20 nt, Artificial Sequence
  HTT spacer sequence TTCN PAM
cuucauggcacaugucaauu

SEQ ID NO: 34934 - RNA, 20 nt, Artificial Sequence
  HTT spacer sequence TTCN PAM
caucucccacggcacuuuuu

SEQ ID NO: 34935 - RNA, 20 nt, Artificial Sequence
  HTT spacer sequence TTCN PAM
ccacuucucaucucccacgg

SEQ ID NO: 34936 - RNA, 20 nt, Artificial Sequence
  HTT spacer sequence TTCN PAM
uuucuccacuucucaucucc

SEQ ID NO: 34937 - RNA, 20 nt, Artificial Sequence
  HTT spacer sequence TTCN PAM
uuuuucuuggaagcaggaau

SEQ ID NO: 34938 - RNA, 20 nt, Artificial Sequence
  HTT spacer sequence TTCN PAM
uggaagcaggaauaacuuca

SEQ ID NO: 34939 - RNA, 20 nt, Artificial Sequence
  HTT spacer sequence TTCN PAM
aagaaaaaagaaauuccuuu

SEQ ID NO: 34940 - RNA, 20 nt, Artificial Sequence
  HTT spacer sequence TTCN PAM
ugcuuccaagaaaaaagaaa

SEQ ID NO: 34941 - RNA, 20 nt, Artificial Sequence
  HTT spacer sequence TTCN PAM
ugaagcauguauuucaacuu

SEQ ID NO: 34942 - RNA, 20 nt, Artificial Sequence
  HTT spacer sequence TTCN PAM
ugaaguuauuccugcuucca

SEQ ID NO: 34943 - RNA, 20 nt, Artificial Sequence
  HTT spacer sequence TTCN PAM
acuuaaacagauaguaggca

SEQ ID NO: 34944 - RNA, 20 nt, Artificial Sequence
  HTT spacer sequence TTCN PAM
gggcagacugggaggaaggg

SEQ ID NO: 34945 - RNA, 20 nt, Artificial Sequence
  HTT spacer sequence TTCN PAM
ucccagucugccccgaacac

SEQ ID NO: 34946 - RNA, 20 nt, Artificial Sequence
  HTT spacer sequence TTCN PAM
cucccuuccucccagucugc

SEQ ID NO: 34947 - RNA, 20 nt, Artificial Sequence
  HTT spacer sequence TTCN PAM
gccauuguuauggaauaaug

SEQ ID NO: 34948 - RNA, 20 nt, Artificial Sequence
  HTT spacer sequence TTCN PAM
auaacaauggcugaauuuau

SEQ ID NO: 34949 - RNA, 20 nt, Artificial Sequence
  HTT spacer sequence TTCN PAM
gcccguuucacuuaaaaguu

SEQ ID NO: 34950 - RNA, 20 nt, Artificial Sequence
  HTT spacer sequence TTCN PAM
cuuaaaaguugagacugcuu

SEQ ID NO: 34951 - RNA, 20 nt, Artificial Sequence
  HTT spacer sequence TTCN PAM
aauaacaaaaauauagagac

SEQ ID NO: 34952 - RNA, 20 nt, Artificial Sequence
  HTT spacer sequence TTCN PAM
auagugacgucuguuaugcu

SEQ ID NO: 34953 - RNA, 20 nt, Artificial Sequence
  HTT spacer sequence TTCN PAM
agaguuauugcagcaguuuc

SEQ ID NO: 34954 - RNA, 20 nt, Artificial Sequence
  HTT spacer sequence TTCN PAM
caugaacuaaucacaucaac

SEQ ID NO: 34955 - RNA, 20 nt, Artificial Sequence
  HTT spacer sequence TTCN PAM
ugagaaacugcugcaauaac

SEQ ID NO: 34956 - RNA, 20 nt, Artificial Sequence
  HTT spacer sequence TTCN PAM
ugaucggucuuacugacauu

SEQ ID NO: 34957 - RNA, 20 nt, Artificial Sequence
  HTT spacer sequence TTCN PAM
uagcaagccucauggauaag

SEQ ID NO: 34958 - RNA, 20 nt, Artificial Sequence
  HTT spacer sequence TTCN PAM
gugaaaagaaucucagcuua

SEQ ID NO: 34959 - RNA, 20 nt, Artificial Sequence
  HTT spacer sequence TTCN PAM
cagaagcacaauuucuuagc

SEQ ID NO: 34960 - RNA, 20 nt, Artificial Sequence
  HTT spacer sequence TTCN PAM
uuucacagaagcacaauuuc

SEQ ID NO: 34961 - RNA, 20 nt, Artificial Sequence
  HTT spacer sequence TTCN PAM
uggaguaagcugagauucuu

SEQ ID NO: 34962 - RNA, 20 nt, Artificial Sequence
  HTT spacer sequence TTCN PAM
gauuauuaaaguaauacacg

SEQ ID NO: 34963 - RNA, 20 nt, Artificial Sequence
  HTT spacer sequence TTCN PAM
gccaauuuaggaagacacaa

SEQ ID NO: 34964 - RNA, 20 nt, Artificial Sequence
  HTT spacer sequence TTCN PAM
uaaauuggcugaauuuuuuu

SEQ ID NO: 34965 - RNA, 20 nt, Artificial Sequence
  HTT spacer sequence TTCN PAM
ccacguuggccaggcuggua

SEQ ID NO: 34966 - RNA, 20 nt, Artificial Sequence
  HTT spacer sequence TTCN PAM
ccugccucagccuccugagu

SEQ ID NO: 34967 - RNA, 20 nt, Artificial Sequence
  HTT spacer sequence TTCN PAM
agcgauucuccugccucagc

SEQ ID NO: 34968 - RNA, 20 nt, Artificial Sequence
  HTT spacer sequence TTCN PAM
uuuuuuuuuuuuuuuuuuga

SEQ ID NO: 34969 - RNA, 20 nt, Artificial Sequence
  HTT spacer sequence TTCN PAM
uuucuuuuuuuuuuuuuuuu

SEQ ID NO: 34970 - RNA, 20 nt, Artificial Sequence
  HTT spacer sequence TTCN PAM
gauacauuaccaaugcaggu

SEQ ID NO: 34971 - RNA, 20 nt, Artificial Sequence
  HTT spacer sequence TTCN PAM
cuuaguauauauuaccaggu

SEQ ID NO: 34972 - RNA, 20 nt, Artificial Sequence
  HTT spacer sequence TTCN PAM
agcaauucuccugccucagc

SEQ ID NO: 34973 - RNA, 20 nt, Artificial Sequence
  HTT spacer sequence TTCN PAM
ccugccucagccuccugagu

SEQ ID NO: 34974 - RNA, 20 nt, Artificial Sequence
  HTT spacer sequence TTCN PAM
ccauguuggucaggcugguc

SEQ ID NO: 34975 - RNA, 20 nt, Artificial Sequence
  HTT spacer sequence TTCN PAM
uauuauaaaaauguaaggcc

SEQ ID NO: 34976 - RNA, 20 nt, Artificial Sequence
  HTT spacer sequence TTCN PAM
aaugucagcaacauaaauuc

SEQ ID NO: 34977 - RNA, 20 nt, Artificial Sequence
  HTT spacer sequence TTCN PAM
uuucuaaugucagcaacaua

SEQ ID NO: 34978 - RNA, 20 nt, Artificial Sequence
  HTT spacer sequence TTCN PAM
uggauauuaugguucuuuuc

SEQ ID NO: 34979 - RNA, 20 nt, Artificial Sequence
  HTT spacer sequence TTCN PAM
uggauucuuggauauuaugg

SEQ ID NO: 34980 - RNA, 20 nt, Artificial Sequence
  HTT spacer sequence TTCN PAM
ccaaagcaucacacuauaua

SEQ ID NO: 34981 - RNA, 20 nt, Artificial Sequence
  HTT spacer sequence TTCN PAM
cucaauauuacaauccagau

SEQ ID NO: 34982 - RNA, 20 nt, Artificial Sequence
  HTT spacer sequence TTCN PAM
gccuuuuuucacucaauauu

SEQ ID NO: 34983 - RNA, 20 nt, Artificial Sequence
  HTT spacer sequence TTCN PAM
guuaagaaaaauaauauuua

SEQ ID NO: 34984 - RNA, 20 nt, Artificial Sequence
  HTT spacer sequence TTCN PAM
uaacugaaauccgacuauac

SEQ ID NO: 34985 - RNA, 20 nt, Artificial Sequence
  HTT spacer sequence TTCN PAM
cacacuggcagauaaucacc

SEQ ID NO: 34986 - RNA, 20 nt, Artificial Sequence
  HTT spacer sequence TTCN PAM
ucuuuauauuuuucagauau

SEQ ID NO: 34987 - RNA, 20 nt, Artificial Sequence
  HTT spacer sequence TTCN PAM
uuauauuuuucagauauucu

SEQ ID NO: 34988 - RNA, 20 nt, Artificial Sequence
  HTT spacer sequence TTCN PAM
gauauucucaaauuuucuaa

SEQ ID NO: 34989 - RNA, 20 nt, Artificial Sequence
  HTT spacer sequence TTCN PAM
caaauuuucuaaaaugagca

SEQ ID NO: 34990 - RNA, 20 nt, Artificial Sequence
  HTT spacer sequence TTCN PAM
aaaaugagcaaguauaacuu

SEQ ID NO: 34991 - RNA, 20 nt, Artificial Sequence
  HTT spacer sequence TTCN PAM
gauaacaaaaguuauacuug

SEQ ID NO: 34992 - RNA, 20 nt, Artificial Sequence
  HTT spacer sequence TTCN PAM
aucucaaaaaauaaaaauaa

SEQ ID NO: 34993 - RNA, 20 nt, Artificial Sequence
  HTT spacer sequence TTCN PAM
uggguucaaaugauucucug

SEQ ID NO: 34994 - RNA, 20 nt, Artificial Sequence
  HTT spacer sequence TTCN PAM
aaugauucucuggccccagc

SEQ ID NO: 34995 - RNA, 20 nt, Artificial Sequence
  HTT spacer sequence TTCN PAM
cuggccccagccuccugagu

SEQ ID NO: 34996 - RNA, 20 nt, Artificial Sequence
  HTT spacer sequence TTCN PAM
agccacucaggaggcugggg

SEQ ID NO: 34997 - RNA, 20 nt, Artificial Sequence
  HTT spacer sequence TTCN PAM
ccagguuggucaggcugguc

SEQ ID NO: 34998 - RNA, 20 nt, Artificial Sequence
  HTT spacer sequence TTCN PAM
agaccagccugaccaaccug

SEQ ID NO: 34999 - RNA, 20 nt, Artificial Sequence
  HTT spacer sequence TTCN PAM
uuugucaaauaaaauaaaaa

SEQ ID NO: 35000 - RNA, 20 nt, Artificial Sequence
  HTT spacer sequence TTCN PAM
auguuauagaagacuaaaua

SEQ ID NO: 35001 - RNA, 20 nt, Artificial Sequence
  HTT spacer sequence TTCN PAM
auaacauggaaguauuucuu

SEQ ID NO: 35002 - RNA, 20 nt, Artificial Sequence
  HTT spacer sequence TTCN PAM
cuugauuuguucaaaauauc

SEQ ID NO: 35003 - RNA, 20 nt, Artificial Sequence
  HTT spacer sequence TTCN PAM
aaauaucguaaacuuugcuu

SEQ ID NO: 35004 - RNA, 20 nt, Artificial Sequence
  HTT spacer sequence TTCN PAM
aucccaagccuacaacagug

SEQ ID NO: 35005 - RNA, 20 nt, Artificial Sequence
  HTT spacer sequence TTCN PAM
ugcccuuaggguuucugcag

SEQ ID NO: 35006 - RNA, 20 nt, Artificial Sequence
  HTT spacer sequence TTCN PAM
gcaggcuggucagggagacg

SEQ ID NO: 35007 - RNA, 20 nt, Artificial Sequence
  HTT spacer sequence TTCN PAM
gccucucaacugccccugca

SEQ ID NO: 35008 - RNA, 20 nt, Artificial Sequence
  HTT spacer sequence TTCN PAM
agggugugggcagcacagga

SEQ ID NO: 35009 - RNA, 20 nt, Artificial Sequence
  HTT spacer sequence TTCN PAM
ugugcugcccacacccugga

SEQ ID NO: 35010 - RNA, 20 nt, Artificial Sequence
  HTT spacer sequence TTCN PAM
uugggauauaauugccauuc

SEQ ID NO: 35011 - RNA, 20 nt, Artificial Sequence
  HTT spacer sequence TTCN PAM
gauaacacguguuugaggug

SEQ ID NO: 35012 - RNA, 20 nt, Artificial Sequence
  HTT spacer sequence TTCN PAM
uacuuuagacaccucaaaca

SEQ ID NO: 35013 - RNA, 20 nt, Artificial Sequence
  HTT spacer sequence TTCN PAM
ucucauuguuuguacuuuuu

SEQ ID NO: 35014 - RNA, 20 nt, Artificial Sequence
  HTT spacer sequence TTCN PAM
cauuguuuguacuuuuuaua

SEQ ID NO: 35015 - RNA, 20 nt, Artificial Sequence
  HTT spacer sequence TTCN PAM
auaaaccuuugugguguuug

SEQ ID NO: 35016 - RNA, 20 nt, Artificial Sequence
  HTT spacer sequence TTCN PAM
uucuucucaguuuggaugcu

SEQ ID NO: 35017 - RNA, 20 nt, Artificial Sequence
  HTT spacer sequence TTCN PAM
ucucaguuuggaugcuguga

SEQ ID NO: 35018 - RNA, 20 nt, Artificial Sequence
  HTT spacer sequence TTCN PAM
caguuuggaugcugugaagc

SEQ ID NO: 35019 - RNA, 20 nt, Artificial Sequence
  HTT spacer sequence TTCN PAM
cagcauccaaacugagaaga

SEQ ID NO: 35020 - RNA, 20 nt, Artificial Sequence
  HTT spacer sequence TTCN PAM
uuccacugccuucccaguuu

SEQ ID NO: 35021 - RNA, 20 nt, Artificial Sequence
  HTT spacer sequence TTCN PAM
acugccuucccaguuugcau

SEQ ID NO: 35022 - RNA, 20 nt, Artificial Sequence
  HTT spacer sequence TTCN PAM
caguuugcauuuggaguuua

SEQ ID NO: 35023 - RNA, 20 nt, Artificial Sequence
  HTT spacer sequence TTCN PAM
ucaguauauauuaauaguug

SEQ ID NO: 35024 - RNA, 20 nt, Artificial Sequence
  HTT spacer sequence TTCN PAM
uucuuuuuaagucuuuuauc

SEQ ID NO: 35025 - RNA, 20 nt, Artificial Sequence
  HTT spacer sequence TTCN PAM
uuuuaagucuuuuaucaauu

SEQ ID NO: 35026 - RNA, 20 nt, Artificial Sequence
  HTT spacer sequence TTCN PAM
aaaaagccaaauugauaaaa

SEQ ID NO: 35027 - RNA, 20 nt, Artificial Sequence
  HTT spacer sequence TTCN PAM
aucagauauuuuuccaaaaa

SEQ ID NO: 35028 - RNA, 20 nt, Artificial Sequence
  HTT spacer sequence TTCN PAM
gcuauauuagcugugugaga

SEQ ID NO: 35029 - RNA, 20 nt, Artificial Sequence
  HTT spacer sequence TTCN PAM
cacagcuccugucacuaguc

SEQ ID NO: 35030 - RNA, 20 nt, Artificial Sequence
  HTT spacer sequence TTCN PAM
uuucccacagcuccugucac

SEQ ID NO: 35031 - RNA, 20 nt, Artificial Sequence
  HTT spacer sequence TTCN PAM
uaggcauugaugggaauuuc

SEQ ID NO: 35032 - RNA, 20 nt, Artificial Sequence
  HTT spacer sequence TTCN PAM
caucaaugccuaagaacauu

SEQ ID NO: 35033 - RNA, 20 nt, Artificial Sequence
  HTT spacer sequence TTCN PAM
ggguguggucuucaaguuca

SEQ ID NO: 35034 - RNA, 20 nt, Artificial Sequence
  HTT spacer sequence TTCN PAM
aguucauuuaagggaauuuu

SEQ ID NO: 35035 - RNA, 20 nt, Artificial Sequence
  HTT spacer sequence TTCN PAM
uuuaagggaauuuucauaug

SEQ ID NO: 35036 - RNA, 20 nt, Artificial Sequence
  HTT spacer sequence TTCN PAM
cuuaaaugaacuugaagacc

SEQ ID NO: 35037 - RNA, 20 nt, Artificial Sequence
  HTT spacer sequence TTCN PAM
uaugcuggcaaaaggcuuuu

SEQ ID NO: 35038 - RNA, 20 nt, Artificial Sequence
  HTT spacer sequence TTCN PAM
cauuagcuugacucuuucca

SEQ ID NO: 35039 - RNA, 20 nt, Artificial Sequence
  HTT spacer sequence TTCN PAM
aaaauuauuugcugugaauu

SEQ ID NO: 35040 - RNA, 20 nt, Artificial Sequence
  HTT spacer sequence TTCN PAM
cagcaaauaauuuuggaaag

SEQ ID NO: 35041 - RNA, 20 nt, Artificial Sequence
  HTT spacer sequence TTCN PAM
aauucacagcaaauaauuuu

SEQ ID NO: 35042 - RNA, 20 nt, Artificial Sequence
  HTT spacer sequence TTCN PAM
uaaacuucuaauucacagca

SEQ ID NO: 35043 - RNA, 20 nt, Artificial Sequence
  HTT spacer sequence TTCN PAM
cuuaauugugaccuagcaua

SEQ ID NO: 35044 - RNA, 20 nt, Artificial Sequence
  HTT spacer sequence TTCN PAM
uaugcuaggucacaauuaag

SEQ ID NO: 35045 - RNA, 20 nt, Artificial Sequence
  HTT spacer sequence TTCN PAM
uaaaucaucaccauuucgua

SEQ ID NO: 35046 - RNA, 20 nt, Artificial Sequence
  HTT spacer sequence TTCN PAM
uguauuaacagcuuuuauuu

SEQ ID NO: 35047 - RNA, 20 nt, Artificial Sequence
  HTT spacer sequence TTCN PAM
uccaguagauggcccuacua

SEQ ID NO: 35048 - RNA, 20 nt, Artificial Sequence
  HTT spacer sequence TTCN PAM
cagaugcuaguagggccauc

SEQ ID NO: 35049 - RNA, 20 nt, Artificial Sequence
  HTT spacer sequence TTCN PAM
agucuucuccagcauucagg

SEQ ID NO: 35050 - RNA, 20 nt, Artificial Sequence
  HTT spacer sequence TTCN PAM
ccagcauucaggaauaggcu

SEQ ID NO: 35051 - RNA, 20 nt, Artificial Sequence
  HTT spacer sequence TTCN PAM
ggaauaggcuuucauuuugu

SEQ ID NO: 35052 - RNA, 20 nt, Artificial Sequence
  HTT spacer sequence TTCN PAM
ugaaugcuggagaagacuug

SEQ ID NO: 35053 - RNA, 20 nt, Artificial Sequence
  HTT spacer sequence TTCN PAM
uuuuguguaucaauuacuga

SEQ ID NO: 35054 - RNA, 20 nt, Artificial Sequence
  HTT spacer sequence TTCN PAM
caguaauugauacacaaaau

SEQ ID NO: 35055 - RNA, 20 nt, Artificial Sequence
  HTT spacer sequence TTCN PAM
caaaugugaugugagucacc

SEQ ID NO: 35056 - RNA, 20 nt, Artificial Sequence
  HTT spacer sequence TTCN PAM
ugugugugucagcaaaugac

SEQ ID NO: 35057 - RNA, 20 nt, Artificial Sequence
  HTT spacer sequence TTCN PAM
agcaaauaucaguuggucau

SEQ ID NO: 35058 - RNA, 20 nt, Artificial Sequence
  HTT spacer sequence TTCN PAM
agagcagauaauguaaucca

SEQ ID NO: 35059 - RNA, 20 nt, Artificial Sequence
  HTT spacer sequence TTCN PAM
caccuuccucacauacagac

SEQ ID NO: 35060 - RNA, 20 nt, Artificial Sequence
  HTT spacer sequence TTCN PAM
ucacauacagacugagcagc

SEQ ID NO: 35061 - RNA, 20 nt, Artificial Sequence
  HTT spacer sequence TTCN PAM
aaucauaggucuggcacuag

SEQ ID NO: 35062 - RNA, 20 nt, Artificial Sequence
  HTT spacer sequence TTCN PAM
cuucugggcaacuuuggcau

SEQ ID NO: 35063 - RNA, 20 nt, Artificial Sequence
  HTT spacer sequence TTCN PAM
gggcaacuuuggcauuggag

SEQ ID NO: 35064 - RNA, 20 nt, Artificial Sequence
  HTT spacer sequence TTCN PAM
uuaaauuaauacauuuuacu

SEQ ID NO: 35065 - RNA, 20 nt, Artificial Sequence
  HTT spacer sequence TTCN PAM
aguaaacauacaguucuaau

SEQ ID NO: 35066 - RNA, 20 nt, Artificial Sequence
  HTT spacer sequence TTCN PAM
aauacuuuuuacaauuuaaa

SEQ ID NO: 35067 - RNA, 20 nt, Artificial Sequence
  HTT spacer sequence TTCN PAM
uuuuuauuuuaucauuuaaa

SEQ ID NO: 35068 - RNA, 20 nt, Artificial Sequence
  HTT spacer sequence TTCN PAM
gcaucuguucacaagggguu

SEQ ID NO: 35069 - RNA, 20 nt, Artificial Sequence
  HTT spacer sequence TTCN PAM
caagggguugauauuuauga

SEQ ID NO: 35070 - RNA, 20 nt, Artificial Sequence
  HTT spacer sequence TTCN PAM
auucuccauauccauucuau

SEQ ID NO: 35071 - RNA, 20 nt, Artificial Sequence
  HTT spacer sequence TTCN PAM
ccauauccauucuauguucu

SEQ ID NO: 35072 - RNA, 20 nt, Artificial Sequence
  HTT spacer sequence TTCN PAM
auguucucuuaaugcucagu

SEQ ID NO: 35073 - RNA, 20 nt, Artificial Sequence
  HTT spacer sequence TTCN PAM
cuuaaugcucagucagcacc

SEQ ID NO: 35074 - RNA, 20 nt, Artificial Sequence
  HTT spacer sequence TTCN PAM
augcuugguaguuugacuua

SEQ ID NO: 35075 - RNA, 20 nt, Artificial Sequence
  HTT spacer sequence TTCN PAM
aggggauugagcccugggua

SEQ ID NO: 35076 - RNA, 20 nt, Artificial Sequence
  HTT spacer sequence TTCN PAM
auaacuuuuacuacaagaua

SEQ ID NO: 35077 - RNA, 20 nt, Artificial Sequence
  HTT spacer sequence TTCN PAM
ccaaugguauccuuuaacac

SEQ ID NO: 35078 - RNA, 20 nt, Artificial Sequence
  HTT spacer sequence TTCN PAM
ugauauuauuauguugguuc

SEQ ID NO: 35079 - RNA, 20 nt, Artificial Sequence
  HTT spacer sequence TTCN PAM
auaguaauaaagaguucacc

SEQ ID NO: 35080 - RNA, 20 nt, Artificial Sequence
  HTT spacer sequence TTCN PAM
ccccagccaauucucuuuua

SEQ ID NO: 35081 - RNA, 20 nt, Artificial Sequence
  HTT spacer sequence TTCN PAM
cuuuuauuuugugccuguuu

SEQ ID NO: 35082 - RNA, 20 nt, Artificial Sequence
  HTT spacer sequence TTCN PAM
gcagaaccauugucauaugc

SEQ ID NO: 35083 - RNA, 20 nt, Artificial Sequence
  HTT spacer sequence TTCN PAM
gcugaacuggagaugagaca

SEQ ID NO: 35084 - RNA, 20 nt, Artificial Sequence
  HTT spacer sequence TTCN PAM
uucauuggacacuuaggccc

SEQ ID NO: 35085 - RNA, 20 nt, Artificial Sequence
  HTT spacer sequence TTCN PAM
uuggacacuuaggccccaau

SEQ ID NO: 35086 - RNA, 20 nt, Artificial Sequence
  HTT spacer sequence TTCN PAM
uucagaucuacuaccugauu

SEQ ID NO: 35087 - RNA, 20 nt, Artificial Sequence
  HTT spacer sequence TTCN PAM
gaucuacuaccugauuucau

SEQ ID NO: 35088 - RNA, 20 nt, Artificial Sequence
  HTT spacer sequence TTCN PAM
uuucucaaaugauuuuuaug

SEQ ID NO: 35089 - RNA, 20 nt, Artificial Sequence
  HTT spacer sequence TTCN PAM
caaaugauuuuuauggagcu

SEQ ID NO: 35090 - RNA, 20 nt, Artificial Sequence
  HTT spacer sequence TTCN PAM
uauaaaucagagcuccauaa

SEQ ID NO: 35091 - RNA, 20 nt, Artificial Sequence
  HTT spacer sequence TTCN PAM
gagcugguauaaaauguauu

SEQ ID NO: 35092 - RNA, 20 nt, Artificial Sequence
  HTT spacer sequence TTCN PAM
ucuuggaauugcaagagaaa

SEQ ID NO: 35093 - RNA, 20 nt, Artificial Sequence
  HTT spacer sequence TTCN PAM
aagaggaaggcaugucacaa

SEQ ID NO: 35094 - RNA, 20 nt, Artificial Sequence
  HTT spacer sequence TTCN PAM
cuugcaauuccaagaggaag

SEQ ID NO: 35095 - RNA, 20 nt, Artificial Sequence
  HTT spacer sequence TTCN PAM
uuucucuugcaauuccaaga

SEQ ID NO: 35096 - RNA, 20 nt, Artificial Sequence
  HTT spacer sequence TTCN PAM
agagugccuccacugagugc

SEQ ID NO: 35097 - RNA, 20 nt, Artificial Sequence
  HTT spacer sequence TTCN PAM
uagacucaucugaggcacuc

SEQ ID NO: 35098 - RNA, 20 nt, Artificial Sequence
  HTT spacer sequence TTCN PAM
gacccugcucucgucagcuu

SEQ ID NO: 35099 - RNA, 20 nt, Artificial Sequence
  HTT spacer sequence TTCN PAM
cauuggaucucucagcccau

SEQ ID NO: 35100 - RNA, 20 nt, Artificial Sequence
  HTT spacer sequence TTCN PAM
ggccaaaaucaaagcaucuu

SEQ ID NO: 35101 - RNA, 20 nt, Artificial Sequence
  HTT spacer sequence TTCN PAM
acucaguaccaguaccugca

SEQ ID NO: 35102 - RNA, 20 nt, Artificial Sequence
  HTT spacer sequence TTCN PAM
uuagggggaauggggguggu

SEQ ID NO: 35103 - RNA, 20 nt, Artificial Sequence
  HTT spacer sequence TTCN PAM
cccuaaggaaaucaaaaucc

SEQ ID NO: 35104 - RNA, 20 nt, Artificial Sequence
  HTT spacer sequence TTCN PAM
ccucauaugcucaccacccc

SEQ ID NO: 35105 - RNA, 20 nt, Artificial Sequence
  HTT spacer sequence TTCN PAM
gauguuaccuauaugcauaa

SEQ ID NO: 35106 - RNA, 20 nt, Artificial Sequence
  HTT spacer sequence TTCN PAM
gugcugaguauuuuaaagua

SEQ ID NO: 35107 - RNA, 20 nt, Artificial Sequence
  HTT spacer sequence TTCN PAM
caauauagccccucaguuaa

SEQ ID NO: 35108 - RNA, 20 nt, Artificial Sequence
  HTT spacer sequence TTCN PAM
aaaugaguuuacuuguaguu

SEQ ID NO: 35109 - RNA, 20 nt, Artificial Sequence
  HTT spacer sequence TTCN PAM
uuuuaaugggcaccauaugc

SEQ ID NO: 35110 - RNA, 20 nt, Artificial Sequence
  HTT spacer sequence TTCN PAM
uaacaucccagugcccgagg

SEQ ID NO: 35111 - RNA, 20 nt, Artificial Sequence
  HTT spacer sequence TTCN PAM
uucucaaguuaguuuuagau

SEQ ID NO: 35112 - RNA, 20 nt, Artificial Sequence
  HTT spacer sequence TTCN PAM
caaguuaguuuuagauuaga

SEQ ID NO: 35113 - RNA, 20 nt, Artificial Sequence
  HTT spacer sequence TTCN PAM
uaccagcccauaaaucugcc

SEQ ID NO: 35114 - RNA, 20 nt, Artificial Sequence
  HTT spacer sequence TTCN PAM
uugcuggccacauccuccau

SEQ ID NO: 35115 - RNA, 20 nt, Artificial Sequence
  HTT spacer sequence TTCN PAM
auggacuccgucuuccuugc

SEQ ID NO: 35116 - RNA, 20 nt, Artificial Sequence
  HTT spacer sequence TTCN PAM
cccaaaaucaauuucaaugg

SEQ ID NO: 35117 - RNA, 20 nt, Artificial Sequence
  HTT spacer sequence TTCN PAM
uggagauuggcaacuucucc

SEQ ID NO: 35118 - RNA, 20 nt, Artificial Sequence
  HTT spacer sequence TTCN PAM
uucauggagauuggcaacuu

SEQ ID NO: 35119 - RNA, 20 nt, Artificial Sequence
  HTT spacer sequence TTCN PAM
gggggcuauaggagaguuuc

SEQ ID NO: 35120 - RNA, 20 nt, Artificial Sequence
  HTT spacer sequence TTCN PAM
ugaaagggacuaaaagauga

SEQ ID NO: 35121 - RNA, 20 nt, Artificial Sequence
  HTT spacer sequence TTCN PAM
cgaaacucuccuauagcccc

SEQ ID NO: 35122 - RNA, 20 nt, Artificial Sequence
  HTT spacer sequence TTCN PAM
uccaacuugaacaugggcug

SEQ ID NO: 35123 - RNA, 20 nt, Artificial Sequence
  HTT spacer sequence TTCN PAM
aguuggaugaaugaucuuau

SEQ ID NO: 35124 - RNA, 20 nt, Artificial Sequence
  HTT spacer sequence TTCN PAM
ccuccagcccauguucaagu

SEQ ID NO: 35125 - RNA, 20 nt, Artificial Sequence
  HTT spacer sequence TTCN PAM
cuacagucccaaagccauua

SEQ ID NO: 35126 - RNA, 20 nt, Artificial Sequence
  HTT spacer sequence TTCN PAM
cuuacaaucagugucuuccc

SEQ ID NO: 35127 - RNA, 20 nt, Artificial Sequence
  HTT spacer sequence TTCN PAM
uucucuuacaaucagugucu

SEQ ID NO: 35128 - RNA, 20 nt, Artificial Sequence
  HTT spacer sequence TTCN PAM
gccuccuucauucucuuaca

SEQ ID NO: 35129 - RNA, 20 nt, Artificial Sequence
  HTT spacer sequence TTCN PAM
ccaacugaacuucgguugug

SEQ ID NO: 35130 - RNA, 20 nt, Artificial Sequence
  HTT spacer sequence TTCN PAM
guuggugaaccaggccuggc

SEQ ID NO: 35131 - RNA, 20 nt, Artificial Sequence
  HTT spacer sequence TTCN PAM
guugugaagacaaagaaacc

SEQ ID NO: 35132 - RNA, 20 nt, Artificial Sequence
  HTT spacer sequence TTCN PAM
caaccgaaguucaguuggug

SEQ ID NO: 35133 - RNA, 20 nt, Artificial Sequence
  HTT spacer sequence TTCN PAM
uugucuucacaaccgaaguu

SEQ ID NO: 35134 - RNA, 20 nt, Artificial Sequence
  HTT spacer sequence TTCN PAM
cauccugggcaggugugugg

SEQ ID NO: 35135 - RNA, 20 nt, Artificial Sequence
  HTT spacer sequence TTCN PAM
augacugucaccaccacaca

SEQ ID NO: 35136 - RNA, 20 nt, Artificial Sequence
  HTT spacer sequence TTCN PAM
caauuuccaugacugucacc

SEQ ID NO: 35137 - RNA, 20 nt, Artificial Sequence
  HTT spacer sequence TTCN PAM
cgcacaaaucuguguuccca

SEQ ID NO: 35138 - RNA, 20 nt, Artificial Sequence
  HTT spacer sequence TTCN PAM
guuugaguuuggcuuaucag

SEQ ID NO: 35139 - RNA, 20 nt, Artificial Sequence
  HTT spacer sequence TTCN PAM
acugauaagccaaacucaaa

SEQ ID NO: 35140 - RNA, 20 nt, Artificial Sequence
  HTT spacer sequence TTCN PAM
guuccccaagcaauuugucc

SEQ ID NO: 35141 - RNA, 20 nt, Artificial Sequence
  HTT spacer sequence TTCN PAM
ccaagcaauuuguccuuccc

SEQ ID NO: 35142 - RNA, 20 nt, Artificial Sequence
  HTT spacer sequence TTCN PAM
caugcuauugggguggagag

SEQ ID NO: 35143 - RNA, 20 nt, Artificial Sequence
  HTT spacer sequence TTCN PAM
cagagauuugggagcacugg

SEQ ID NO: 35144 - RNA, 20 nt, Artificial Sequence
  HTT spacer sequence TTCN PAM
ugggccucugaagaagaagc

SEQ ID NO: 35145 - RNA, 20 nt, Artificial Sequence
  HTT spacer sequence TTCN PAM
gaggcccaugaacuucucag

SEQ ID NO: 35146 - RNA, 20 nt, Artificial Sequence
  HTT spacer sequence TTCN PAM
ucagaggcccaugaacuucu

SEQ ID NO: 35147 - RNA, 20 nt, Artificial Sequence
  HTT spacer sequence TTCN PAM
ucuucagaggcccaugaacu

SEQ ID NO: 35148 - RNA, 20 nt, Artificial Sequence
  HTT spacer sequence TTCN PAM
cucaccugcugaaggugauu

SEQ ID NO: 35149 - RNA, 20 nt, Artificial Sequence
  HTT spacer sequence TTCN PAM
gcaggugagagaagagcugc

SEQ ID NO: 35150 - RNA, 20 nt, Artificial Sequence
  HTT spacer sequence TTCN PAM
uacagccuuaaugacuaugg

SEQ ID NO: 35151 - RNA, 20 nt, Artificial Sequence
  HTT spacer sequence TTCN PAM
agacuaccuuuguuuaguaa

SEQ ID NO: 35152 - RNA, 20 nt, Artificial Sequence
  HTT spacer sequence TTCN PAM
uuauucucuuuuugcuuuaa

SEQ ID NO: 35153 - RNA, 20 nt, Artificial Sequence
  HTT spacer sequence TTCN PAM
cuuuuugcuuuaaaugaaca

SEQ ID NO: 35154 - RNA, 20 nt, Artificial Sequence
  HTT spacer sequence TTCN PAM
uuuaaagcaaaaagagaaua

SEQ ID NO: 35155 - RNA, 20 nt, Artificial Sequence
  HTT spacer sequence TTCN PAM
agcacuuugggagacugagg

SEQ ID NO: 35156 - RNA, 20 nt, Artificial Sequence
  HTT spacer sequence TTCN PAM
agaccagccugggcaacauc

SEQ ID NO: 35157 - RNA, 20 nt, Artificial Sequence
  HTT spacer sequence TTCN PAM
ugauguugcccaggcugguc

SEQ ID NO: 35158 - RNA, 20 nt, Artificial Sequence
  HTT spacer sequence TTCN PAM
cuguguuagccaggaugguc

SEQ ID NO: 35159 - RNA, 20 nt, Artificial Sequence
  HTT spacer sequence TTCN PAM
ccugccucagccucccgagc

SEQ ID NO: 35160 - RNA, 20 nt, Artificial Sequence
  HTT spacer sequence TTCN PAM
cgccauucuccugccucagc

SEQ ID NO: 35161 - RNA, 20 nt, Artificial Sequence
  HTT spacer sequence TTCN PAM
agcaacucucuugccucagc

SEQ ID NO: 35162 - RNA, 20 nt, Artificial Sequence
  HTT spacer sequence TTCN PAM
aaaagaagaaaaaaauguga

SEQ ID NO: 35163 - RNA, 20 nt, Artificial Sequence
  HTT spacer sequence TTCN PAM
uuuggaaagagucugacucu

SEQ ID NO: 35164 - RNA, 20 nt, Artificial Sequence
  HTT spacer sequence TTCN PAM
ucuuuuggaaagagucugac

SEQ ID NO: 35165 - RNA, 20 nt, Artificial Sequence
  HTT spacer sequence TTCN PAM
cucuuagggauaacagugac

SEQ ID NO: 35166 - RNA, 20 nt, Artificial Sequence
  HTT spacer sequence TTCN PAM
agcauuagccaagaaagcuc

SEQ ID NO: 35167 - RNA, 20 nt, Artificial Sequence
  HTT spacer sequence TTCN PAM
uggcuaaugcuggaaaccua

SEQ ID NO: 35168 - RNA, 20 nt, Artificial Sequence
  HTT spacer sequence TTCN PAM
gagcuuucuuggcuaaugcu

SEQ ID NO: 35169 - RNA, 20 nt, Artificial Sequence
  HTT spacer sequence TTCN PAM
uggccaaguaccucauugcu

SEQ ID NO: 35170 - RNA, 20 nt, Artificial Sequence
  HTT spacer sequence TTCN PAM
augguuguagaauguucugc

SEQ ID NO: 35171 - RNA, 20 nt, Artificial Sequence
  HTT spacer sequence TTCN PAM
acaaccauggaaaugcucca

SEQ ID NO: 35172 - RNA, 20 nt, Artificial Sequence
  HTT spacer sequence TTCN PAM
gccaaucucagggacaguuu

SEQ ID NO: 35173 - RNA, 20 nt, Artificial Sequence
  HTT spacer sequence TTCN PAM
gugaagcaauaaaaucaacu

SEQ ID NO: 35174 - RNA, 20 nt, Artificial Sequence
  HTT spacer sequence TTCN PAM
cagaaaagcaaaacuguccc

SEQ ID NO: 35175 - RNA, 20 nt, Artificial Sequence
  HTT spacer sequence TTCN PAM
aaacaaauguuaacuauuug

SEQ ID NO: 35176 - RNA, 20 nt, Artificial Sequence
  HTT spacer sequence TTCN PAM
cauacuuuuuuuuuuuuuuu

SEQ ID NO: 35177 - RNA, 20 nt, Artificial Sequence
  HTT spacer sequence TTCN PAM
uucuuguugccugggcugga

SEQ ID NO: 35178 - RNA, 20 nt, Artificial Sequence
  HTT spacer sequence TTCN PAM
uguugccugggcuggagugc

SEQ ID NO: 35179 - RNA, 20 nt, Artificial Sequence
  HTT spacer sequence TTCN PAM
gccuccuggguucaaacgau

SEQ ID NO: 35180 - RNA, 20 nt, Artificial Sequence
  HTT spacer sequence TTCN PAM
aacgauucuucugccucagc

SEQ ID NO: 35181 - RNA, 20 nt, Artificial Sequence
  HTT spacer sequence TTCN PAM
ucugccucagccucucgagg

SEQ ID NO: 35182 - RNA, 20 nt, Artificial Sequence
  HTT spacer sequence TTCN PAM
gccucagccucucgaggcag

SEQ ID NO: 35183 - RNA, 20 nt, Artificial Sequence
  HTT spacer sequence TTCN PAM
ccauguuggucagguugguc

SEQ ID NO: 35184 - RNA, 20 nt, Artificial Sequence
  HTT spacer sequence TTCN PAM
ggucaggaguuugagaccaa

SEQ ID NO: 35185 - RNA, 20 nt, Artificial Sequence
  HTT spacer sequence TTCN PAM
gccucccaaaguguugggau

SEQ ID NO: 35186 - RNA, 20 nt, Artificial Sequence
  HTT spacer sequence TTCN PAM
cuuacuguuuauaucugauu

SEQ ID NO: 35187 - RNA, 20 nt, Artificial Sequence
  HTT spacer sequence TTCN PAM
accuuuaaaaaucucccuac

SEQ ID NO: 35188 - RNA, 20 nt, Artificial Sequence
  HTT spacer sequence TTCN PAM
cauucuccuuuagcugccau

SEQ ID NO: 35189 - RNA, 20 nt, Artificial Sequence
  HTT spacer sequence TTCN PAM
ccuuuagcugccaucagucu

SEQ ID NO: 35190 - RNA, 20 nt, Artificial Sequence
  HTT spacer sequence TTCN PAM
cccuucucugcaaacaucuc

SEQ ID NO: 35191 - RNA, 20 nt, Artificial Sequence
  HTT spacer sequence TTCN PAM
cugcaaacaucucuggagag

SEQ ID NO: 35192 - RNA, 20 nt, Artificial Sequence
  HTT spacer sequence TTCN PAM
cacugcucugagguggaccu

SEQ ID NO: 35193 - RNA, 20 nt, Artificial Sequence
  HTT spacer sequence TTCN PAM
uuggcucucuuggccuggac

SEQ ID NO: 35194 - RNA, 20 nt, Artificial Sequence
  HTT spacer sequence TTCN PAM
gccauccuuccuuaaccccu

SEQ ID NO: 35195 - RNA, 20 nt, Artificial Sequence
  HTT spacer sequence TTCN PAM
uuaaccccugcuggugguuu

SEQ ID NO: 35196 - RNA, 20 nt, Artificial Sequence
  HTT spacer sequence TTCN PAM
guugccacacuccauagcag

SEQ ID NO: 35197 - RNA, 20 nt, Artificial Sequence
  HTT spacer sequence TTCN PAM
cgcccagaucaugucuuuac

SEQ ID NO: 35198 - RNA, 20 nt, Artificial Sequence
  HTT spacer sequence TTCN PAM
cucuuuguauccugcaggcu

SEQ ID NO: 35199 - RNA, 20 nt, Artificial Sequence
  HTT spacer sequence TTCN PAM
guuggcuuucagagggccuc

SEQ ID NO: 35200 - RNA, 20 nt, Artificial Sequence
  HTT spacer sequence TTCN PAM
gagggccuccuggguguucc

SEQ ID NO: 35201 - RNA, 20 nt, Artificial Sequence
  HTT spacer sequence TTCN PAM
cuuacccacuugccacuccc

SEQ ID NO: 35202 - RNA, 20 nt, Artificial Sequence
  HTT spacer sequence TTCN PAM
guccuuccugcccaccagca

SEQ ID NO: 35203 - RNA, 20 nt, Artificial Sequence
  HTT spacer sequence TTCN PAM
ugcccaccagcacaugcuuu

SEQ ID NO: 35204 - RNA, 20 nt, Artificial Sequence
  HTT spacer sequence TTCN PAM
aggcucuguccuaggccguc

SEQ ID NO: 35205 - RNA, 20 nt, Artificial Sequence
  HTT spacer sequence TTCN PAM
cucuuuguagucucugggcc

SEQ ID NO: 35206 - RNA, 20 nt, Artificial Sequence
  HTT spacer sequence TTCN PAM
agagaguggcagaauuuucu

SEQ ID NO: 35207 - RNA, 20 nt, Artificial Sequence
  HTT spacer sequence TTCN PAM
gccacucucuagaacagcac

SEQ ID NO: 35208 - RNA, 20 nt, Artificial Sequence
  HTT spacer sequence TTCN PAM
auaaccauggcagugcucca

SEQ ID NO: 35209 - RNA, 20 nt, Artificial Sequence
  HTT spacer sequence TTCN PAM
agggcucaacagcuauaugu

SEQ ID NO: 35210 - RNA, 20 nt, Artificial Sequence
  HTT spacer sequence TTCN PAM
gucacacuagcugcauuuca

SEQ ID NO: 35211 - RNA, 20 nt, Artificial Sequence
  HTT spacer sequence TTCN PAM
ucagucacacuagcugcauu

SEQ ID NO: 35212 - RNA, 20 nt, Artificial Sequence
  HTT spacer sequence TTCN PAM
guucuucagucacacuagcu

SEQ ID NO: 35213 - RNA, 20 nt, Artificial Sequence
  HTT spacer sequence TTCN PAM
guuuaauuuucauuaaauuu

SEQ ID NO: 35214 - RNA, 20 nt, Artificial Sequence
  HTT spacer sequence TTCN PAM
uuaaauuuaaauuuaaauaa

SEQ ID NO: 35215 - RNA, 20 nt, Artificial Sequence
  HTT spacer sequence TTCN PAM
ccugucuucagugucuagau

SEQ ID NO: 35216 - RNA, 20 nt, Artificial Sequence
  HTT spacer sequence TTCN PAM
gugucuagaugagggaccuc

SEQ ID NO: 35217 - RNA, 20 nt, Artificial Sequence
  HTT spacer sequence TTCN PAM
auguagccagcugccccgug

SEQ ID NO: 35218 - RNA, 20 nt, Artificial Sequence
  HTT spacer sequence TTCN PAM
guccuccuccccacaucugc

SEQ ID NO: 35219 - RNA, 20 nt, Artificial Sequence
  HTT spacer sequence TTCN PAM
agcuugauaagacacaaagu

SEQ ID NO: 35220 - RNA, 20 nt, Artificial Sequence
  HTT spacer sequence TTCN PAM
uuuccacucaccaagucuuu

SEQ ID NO: 35221 - RNA, 20 nt, Artificial Sequence
  HTT spacer sequence TTCN PAM
acucaccaagucuuuuguuu

SEQ ID NO: 35222 - RNA, 20 nt, Artificial Sequence
  HTT spacer sequence TTCN PAM
ccuacuaaauauuuugcgag

SEQ ID NO: 35223 - RNA, 20 nt, Artificial Sequence
  HTT spacer sequence TTCN PAM
cgcaaaauauuuaguagggg

SEQ ID NO: 35224 - RNA, 20 nt, Artificial Sequence
  HTT spacer sequence TTCN PAM
ucucgcaaaauauuuaguag

SEQ ID NO: 35225 - RNA, 20 nt, Artificial Sequence
  HTT spacer sequence TTCN PAM
cauacauguacaugcacaua

SEQ ID NO: 35226 - RNA, 20 nt, Artificial Sequence
  HTT spacer sequence TTCN PAM
agaacuuugggaggccgaga

SEQ ID NO: 35227 - RNA, 20 nt, Artificial Sequence
  HTT spacer sequence TTCN PAM
ggaauuacaggcgugagcca

SEQ ID NO: 35228 - RNA, 20 nt, Artificial Sequence
  HTT spacer sequence TTCN PAM
ggcucacacggugaaacccc

SEQ ID NO: 35229 - RNA, 20 nt, Artificial Sequence
  HTT spacer sequence TTCN PAM
ccgugugagccggaaugguc

SEQ ID NO: 35230 - RNA, 20 nt, Artificial Sequence
  HTT spacer sequence TTCN PAM
ccugcaucagccucccaggu

SEQ ID NO: 35231 - RNA, 20 nt, Artificial Sequence
  HTT spacer sequence TTCN PAM
cgccguucuccugcaucagc

SEQ ID NO: 35232 - RNA, 20 nt, Artificial Sequence
  HTT spacer sequence TTCN PAM
ugugcagccugguuuuuuuu

SEQ ID NO: 35233 - RNA, 20 nt, Artificial Sequence
  HTT spacer sequence TTCN PAM
uccugugcagccugguuuuu

SEQ ID NO: 35234 - RNA, 20 nt, Artificial Sequence
  HTT spacer sequence TTCN PAM
cauaggagcguguaugaguu

SEQ ID NO: 35235 - RNA, 20 nt, Artificial Sequence
  HTT spacer sequence TTCN PAM
uucucacacuucuguaaaga

SEQ ID NO: 35236 - RNA, 20 nt, Artificial Sequence
  HTT spacer sequence TTCN PAM
cacacuucuguaaagacaua

SEQ ID NO: 35237 - RNA, 20 nt, Artificial Sequence
  HTT spacer sequence TTCN PAM
guaaagacauaccugagaca

SEQ ID NO: 35238 - RNA, 20 nt, Artificial Sequence
  HTT spacer sequence TTCN PAM
uuauaugucucagguauguc

SEQ ID NO: 35239 - RNA, 20 nt, Artificial Sequence
  HTT spacer sequence TTCN PAM
gcaggcuguacaggcuucug

SEQ ID NO: 35240 - RNA, 20 nt, Artificial Sequence
  HTT spacer sequence TTCN PAM
guuucugggaaggccucagg

SEQ ID NO: 35241 - RNA, 20 nt, Artificial Sequence
  HTT spacer sequence TTCN PAM
gggaaggccucaggaaacuu

SEQ ID NO: 35242 - RNA, 20 nt, Artificial Sequence
  HTT spacer sequence TTCN PAM
cagaaacagaagccuguaca

SEQ ID NO: 35243 - RNA, 20 nt, Artificial Sequence
  HTT spacer sequence TTCN PAM
ugaggccuucccagaaacag

SEQ ID NO: 35244 - RNA, 20 nt, Artificial Sequence
  HTT spacer sequence TTCN PAM
gccaugacugcaaguuuccu

SEQ ID NO: 35245 - RNA, 20 nt, Artificial Sequence
  HTT spacer sequence TTCN PAM
ccuucugccaugacugcaag

SEQ ID NO: 35246 - RNA, 20 nt, Artificial Sequence
  HTT spacer sequence TTCN PAM
ccuucaccuucugccaugac

SEQ ID NO: 35247 - RNA, 20 nt, Artificial Sequence
  HTT spacer sequence TTCN PAM
cauggcccacaggaaaaaga

SEQ ID NO: 35248 - RNA, 20 nt, Artificial Sequence
  HTT spacer sequence TTCN PAM
ugugggccaugugaagaugu

SEQ ID NO: 35249 - RNA, 20 nt, Artificial Sequence
  HTT spacer sequence TTCN PAM
cucuuuuuccugugggccau

SEQ ID NO: 35250 - RNA, 20 nt, Artificial Sequence
  HTT spacer sequence TTCN PAM
cucucucucucugucucucu

SEQ ID NO: 35251 - RNA, 20 nt, Artificial Sequence
  HTT spacer sequence TTCN PAM
uuuucucucucucucucugu

SEQ ID NO: 35252 - RNA, 20 nt, Artificial Sequence
  HTT spacer sequence TTCN PAM
cccuccucucucccucucaa

SEQ ID NO: 35253 - RNA, 20 nt, Artificial Sequence
  HTT spacer sequence TTCN PAM
aaugguugagcaccaucccc

SEQ ID NO: 35254 - RNA, 20 nt, Artificial Sequence
  HTT spacer sequence TTCN PAM
gcaugagauuugggugggga

SEQ ID NO: 35255 - RNA, 20 nt, Artificial Sequence
  HTT spacer sequence TTCN PAM
ugcucugauaugguuuggcu

SEQ ID NO: 35256 - RNA, 20 nt, Artificial Sequence
  HTT spacer sequence TTCN PAM
caauaggguucaugcucuga

SEQ ID NO: 35257 - RNA, 20 nt, Artificial Sequence
  HTT spacer sequence TTCN PAM
cauaaggagcaugcaaccua

SEQ ID NO: 35258 - RNA, 20 nt, Artificial Sequence
  HTT spacer sequence TTCN PAM
accucaaaucaucaucaggc

SEQ ID NO: 35259 - RNA, 20 nt, Artificial Sequence
  HTT spacer sequence TTCN PAM
ucccgaaaccaucccccgcc

SEQ ID NO: 35260 - RNA, 20 nt, Artificial Sequence
  HTT spacer sequence TTCN PAM
ggaugaaacuguuccaccuc

SEQ ID NO: 35261 - RNA, 20 nt, Artificial Sequence
  HTT spacer sequence TTCN PAM
acaaaccaggguuggcgggg

SEQ ID NO: 35262 - RNA, 20 nt, Artificial Sequence
  HTT spacer sequence TTCN PAM
acagaaccggucccuggugc

SEQ ID NO: 35263 - RNA, 20 nt, Artificial Sequence
  HTT spacer sequence TTCN PAM
guggaagacaauuuuuccac

SEQ ID NO: 35264 - RNA, 20 nt, Artificial Sequence
  HTT spacer sequence TTCN PAM
cugccacuucugguccagac

SEQ ID NO: 35265 - RNA, 20 nt, Artificial Sequence
  HTT spacer sequence TTCN PAM
gguccagacugauauacuau

SEQ ID NO: 35266 - RNA, 20 nt, Artificial Sequence
  HTT spacer sequence TTCN PAM
aaaacaaaaggcuagugcag

SEQ ID NO: 35267 - RNA, 20 nt, Artificial Sequence
  HTT spacer sequence TTCN PAM
guugcccagcuuggagugca

SEQ ID NO: 35268 - RNA, 20 nt, Artificial Sequence
  HTT spacer sequence TTCN PAM
gccucagccuucucaguagu

SEQ ID NO: 35269 - RNA, 20 nt, Artificial Sequence
  HTT spacer sequence TTCN PAM
caguaguugggacuacaggc

SEQ ID NO: 35270 - RNA, 20 nt, Artificial Sequence
  HTT spacer sequence TTCN PAM
gccucccagguucaagugau

SEQ ID NO: 35271 - RNA, 20 nt, Artificial Sequence
  HTT spacer sequence TTCN PAM
agugauucuccugccucagc

SEQ ID NO: 35272 - RNA, 20 nt, Artificial Sequence
  HTT spacer sequence TTCN PAM
ccugccucagccucccgagu

SEQ ID NO: 35273 - RNA, 20 nt, Artificial Sequence
  HTT spacer sequence TTCN PAM
ccauguuggccaggcugguc

SEQ ID NO: 35274 - RNA, 20 nt, Artificial Sequence
  HTT spacer sequence TTCN PAM
agaccagccuggccaacaug

SEQ ID NO: 35275 - RNA, 20 nt, Artificial Sequence
  HTT spacer sequence TTCN PAM
uggcugggagcgguagcuca

SEQ ID NO: 35276 - RNA, 20 nt, Artificial Sequence
  HTT spacer sequence TTCN PAM
ugagauaauucauauaauuc

SEQ ID NO: 35277 - RNA, 20 nt, Artificial Sequence
  HTT spacer sequence TTCN PAM
uauaauucacccauuuaaag

SEQ ID NO: 35278 - RNA, 20 nt, Artificial Sequence
  HTT spacer sequence TTCN PAM
cccauuuaaaguauauaauu

SEQ ID NO: 35279 - RNA, 20 nt, Artificial Sequence
  HTT spacer sequence TTCN PAM
uucucuuuaguaugcccaca

SEQ ID NO: 35280 - RNA, 20 nt, Artificial Sequence
  HTT spacer sequence TTCN PAM
cuuuaguaugcccacagagu

SEQ ID NO: 35281 - RNA, 20 nt, Artificial Sequence
  HTT spacer sequence TTCN PAM
ggugauggcuguacaacucu

SEQ ID NO: 35282 - RNA, 20 nt, Artificial Sequence
  HTT spacer sequence TTCN PAM
aaaacugauucuggugaugg

SEQ ID NO: 35283 - RNA, 20 nt, Artificial Sequence
  HTT spacer sequence TTCN PAM
uuuauggguucuaaaacuga

SEQ ID NO: 35284 - RNA, 20 nt, Artificial Sequence
  HTT spacer sequence TTCN PAM
gucucugugacucuacgucu

SEQ ID NO: 35285 - RNA, 20 nt, Artificial Sequence
  HTT spacer sequence TTCN PAM
ggacauuacuguggaugggc

SEQ ID NO: 35286 - RNA, 20 nt, Artificial Sequence
  HTT spacer sequence TTCN PAM
accaagcaggguuuucagug

SEQ ID NO: 35287 - RNA, 20 nt, Artificial Sequence
  HTT spacer sequence TTCN PAM
guguagcagccucucuguuu

SEQ ID NO: 35288 - RNA, 20 nt, Artificial Sequence
  HTT spacer sequence TTCN PAM
uuuuuuuuuaaauugugacg

SEQ ID NO: 35289 - RNA, 20 nt, Artificial Sequence
  HTT spacer sequence TTCN PAM
gucacaauuuaaaaaaaaaa

SEQ ID NO: 35290 - RNA, 20 nt, Artificial Sequence
  HTT spacer sequence TTCN PAM
gccucccggguucaagcgau

SEQ ID NO: 35291 - RNA, 20 nt, Artificial Sequence
  HTT spacer sequence TTCN PAM
agcgauucuccugccucagc

SEQ ID NO: 35292 - RNA, 20 nt, Artificial Sequence
  HTT spacer sequence TTCN PAM
ccugccucagccucccgagu

SEQ ID NO: 35293 - RNA, 20 nt, Artificial Sequence
  HTT spacer sequence TTCN PAM
acauguuagccagggugguc

SEQ ID NO: 35294 - RNA, 20 nt, Artificial Sequence
  HTT spacer sequence TTCN PAM
ugauccgccugccucggccu

SEQ ID NO: 35295 - RNA, 20 nt, Artificial Sequence
  HTT spacer sequence TTCN PAM
uuuacugucugcauuucuuc

SEQ ID NO: 35296 - RNA, 20 nt, Artificial Sequence
  HTT spacer sequence TTCN PAM
ucccugaugccuuccagucc

SEQ ID NO: 35297 - RNA, 20 nt, Artificial Sequence
  HTT spacer sequence TTCN PAM
cugaugccuuccaguccaug

SEQ ID NO: 35298 - RNA, 20 nt, Artificial Sequence
  HTT spacer sequence TTCN PAM
aguccaugcacccgauugua

SEQ ID NO: 35299 - RNA, 20 nt, Artificial Sequence
  HTT spacer sequence TTCN PAM
uccuauuaugguuuaaggug

SEQ ID NO: 35300 - RNA, 20 nt, Artificial Sequence
  HTT spacer sequence TTCN PAM
acaacagaauuuacuucuca

SEQ ID NO: 35301 - RNA, 20 nt, Artificial Sequence
  HTT spacer sequence TTCN PAM
guuguugaagccacccaggc

SEQ ID NO: 35302 - RNA, 20 nt, Artificial Sequence
  HTT spacer sequence TTCN PAM
cacacuucuggagguuggga

SEQ ID NO: 35303 - RNA, 20 nt, Artificial Sequence
  HTT spacer sequence TTCN PAM
ggagguugggaaguccaaga

SEQ ID NO: 35304 - RNA, 20 nt, Artificial Sequence
  HTT spacer sequence TTCN PAM
caaccuccagaagugugaga

SEQ ID NO: 35305 - RNA, 20 nt, Artificial Sequence
  HTT spacer sequence TTCN PAM
ccuugcccucauguggugag

SEQ ID NO: 35306 - RNA, 20 nt, Artificial Sequence
  HTT spacer sequence TTCN PAM
ucacccccucaccacaugag

SEQ ID NO: 35307 - RNA, 20 nt, Artificial Sequence
  HTT spacer sequence TTCN PAM
ugaggggucugcccucauga

SEQ ID NO: 35308 - RNA, 20 nt, Artificial Sequence
  HTT spacer sequence TTCN PAM
guguauaaauuugggggacu

SEQ ID NO: 35309 - RNA, 20 nt, Artificial Sequence
  HTT spacer sequence TTCN PAM
augucuauagucccccaaau

SEQ ID NO: 35310 - RNA, 20 nt, Artificial Sequence
  HTT spacer sequence TTCN PAM
aagaucagggagugaguaag

SEQ ID NO: 35311 - RNA, 20 nt, Artificial Sequence
  HTT spacer sequence TTCN PAM
acaugucagucaucuugccu

SEQ ID NO: 35312 - RNA, 20 nt, Artificial Sequence
  HTT spacer sequence TTCN PAM
cucugcuccaugauggcugc

SEQ ID NO: 35313 - RNA, 20 nt, Artificial Sequence
  HTT spacer sequence TTCN PAM
auaugcucucauguguugug

SEQ ID NO: 35314 - RNA, 20 nt, Artificial Sequence
  HTT spacer sequence TTCN PAM
uaaagccucaacuaucucca

SEQ ID NO: 35315 - RNA, 20 nt, Artificial Sequence
  HTT spacer sequence TTCN PAM
agcuuugcugguaaccagcu

SEQ ID NO: 35316 - RNA, 20 nt, Artificial Sequence
  HTT spacer sequence TTCN PAM
aggucacagcugguuaccag

SEQ ID NO: 35317 - RNA, 20 nt, Artificial Sequence
  HTT spacer sequence TTCN PAM
ucucugagccuguuuccucu

SEQ ID NO: 35318 - RNA, 20 nt, Artificial Sequence
  HTT spacer sequence TTCN PAM
ucuuuuagaaacaggaguuu

SEQ ID NO: 35319 - RNA, 20 nt, Artificial Sequence
  HTT spacer sequence TTCN PAM
aaaagaggaaacaggcucag

SEQ ID NO: 35320 - RNA, 20 nt, Artificial Sequence
  HTT spacer sequence TTCN PAM
agcacuuugggaggcugaga

SEQ ID NO: 35321 - RNA, 20 nt, Artificial Sequence
  HTT spacer sequence TTCN PAM
agaccagccugggcaucaua

SEQ ID NO: 35322 - RNA, 20 nt, Artificial Sequence
  HTT spacer sequence TTCN PAM
ugaggagacaggaucucaca

SEQ ID NO: 35323 - RNA, 20 nt, Artificial Sequence
  HTT spacer sequence TTCN PAM
uuguagccucaaccuccugg

SEQ ID NO: 35324 - RNA, 20 nt, Artificial Sequence
  HTT spacer sequence TTCN PAM
uuuuugagacagggucucac

SEQ ID NO: 35325 - RNA, 20 nt, Artificial Sequence
  HTT spacer sequence TTCN PAM
ugucauggcgucauggccaa

SEQ ID NO: 35326 - RNA, 20 nt, Artificial Sequence
  HTT spacer sequence TTCN PAM
auguuggccaugacgccaug

SEQ ID NO: 35327 - RNA, 20 nt, Artificial Sequence
  HTT spacer sequence TTCN PAM
aucuucaacucauucucugu

SEQ ID NO: 35328 - RNA, 20 nt, Artificial Sequence
  HTT spacer sequence TTCN PAM
acucauucucugugcaccug

SEQ ID NO: 35329 - RNA, 20 nt, Artificial Sequence
  HTT spacer sequence TTCN PAM
cugugcaccuguuaggaagu

SEQ ID NO: 35330 - RNA, 20 nt, Artificial Sequence
  HTT spacer sequence TTCN PAM
uaacaggugcacagagaaug

SEQ ID NO: 35331 - RNA, 20 nt, Artificial Sequence
  HTT spacer sequence TTCN PAM
gacacuguacacauuuuauu

SEQ ID NO: 35332 - RNA, 20 nt, Artificial Sequence
  HTT spacer sequence TTCN PAM
uggacccugauauguacagu

SEQ ID NO: 35333 - RNA, 20 nt, Artificial Sequence
  HTT spacer sequence TTCN PAM
aauuuucaguuuuguuauac

SEQ ID NO: 35334 - RNA, 20 nt, Artificial Sequence
  HTT spacer sequence TTCN PAM
guuuuguuauacuuccauca

SEQ ID NO: 35335 - RNA, 20 nt, Artificial Sequence
  HTT spacer sequence TTCN PAM
aucacauguuuuuguuuuuu

SEQ ID NO: 35336 - RNA, 20 nt, Artificial Sequence
  HTT spacer sequence TTCN PAM
auuuuaggcagccuugccuu

SEQ ID NO: 35337 - RNA, 20 nt, Artificial Sequence
  HTT spacer sequence TTCN PAM
cuaacaaaccccccuucucu

SEQ ID NO: 35338 - RNA, 20 nt, Artificial Sequence
  HTT spacer sequence TTCN PAM
cuaagucccauccgacgaaa

SEQ ID NO: 35339 - RNA, 20 nt, Artificial Sequence
  HTT spacer sequence TTCN PAM
ucggaugggacuuagagaag

SEQ ID NO: 35340 - RNA, 20 nt, Artificial Sequence
  HTT spacer sequence TTCN PAM
ccuuucgucggaugggacuu

SEQ ID NO: 35341 - RNA, 20 nt, Artificial Sequence
  HTT spacer sequence TTCN PAM
ccuuccccuuucgucggaug

SEQ ID NO: 35342 - RNA, 20 nt, Artificial Sequence
  HTT spacer sequence TTCN PAM
uucuccuuccccuuucgucg

SEQ ID NO: 35343 - RNA, 20 nt, Artificial Sequence
  HTT spacer sequence TTCN PAM
ccugguucuuucuccuuccc

SEQ ID NO: 35344 - RNA, 20 nt, Artificial Sequence
  HTT spacer sequence TTCN PAM
ugggacucaacgguacagau

SEQ ID NO: 35345 - RNA, 20 nt, Artificial Sequence
  HTT spacer sequence TTCN PAM
uaccugcacuggccucacug

SEQ ID NO: 35346 - RNA, 20 nt, Artificial Sequence
  HTT spacer sequence TTCN PAM
ccacgcuguuuccuaccugc

SEQ ID NO: 35347 - RNA, 20 nt, Artificial Sequence
  HTT spacer sequence TTCN PAM
acaugacagaugcugcacuc

SEQ ID NO: 35348 - RNA, 20 nt, Artificial Sequence
  HTT spacer sequence TTCN PAM
cuaaaacaccaaguuacuua

SEQ ID NO: 35349 - RNA, 20 nt, Artificial Sequence
  HTT spacer sequence TTCN PAM
cucacuuuacugauguguau

SEQ ID NO: 35350 - RNA, 20 nt, Artificial Sequence
  HTT spacer sequence TTCN PAM
ccaggugcgguucaagauau

SEQ ID NO: 35351 - RNA, 20 nt, Artificial Sequence
  HTT spacer sequence TTCN PAM
agauauuagaaacuaaugac

SEQ ID NO: 35352 - RNA, 20 nt, Artificial Sequence
  HTT spacer sequence TTCN PAM
aauaucuugaaccgcaccug

SEQ ID NO: 35353 - RNA, 20 nt, Artificial Sequence
  HTT spacer sequence TTCN PAM
gaccaaaagguggucugugu

SEQ ID NO: 35354 - RNA, 20 nt, Artificial Sequence
  HTT spacer sequence TTCN PAM
aagugccacuggcugacaug

SEQ ID NO: 35355 - RNA, 20 nt, Artificial Sequence
  HTT spacer sequence TTCN PAM
agcccuagcauggagcauca

SEQ ID NO: 35356 - RNA, 20 nt, Artificial Sequence
  HTT spacer sequence TTCN PAM
cugguugcaggugauggcug

SEQ ID NO: 35357 - RNA, 20 nt, Artificial Sequence
  HTT spacer sequence TTCN PAM
guaagggaagugguguagau

SEQ ID NO: 35358 - RNA, 20 nt, Artificial Sequence
  HTT spacer sequence TTCN PAM
cuuacugaaaaucaggaggc

SEQ ID NO: 35359 - RNA, 20 nt, Artificial Sequence
  HTT spacer sequence TTCN PAM
uaagcaucuacaccacuucc

SEQ ID NO: 35360 - RNA, 20 nt, Artificial Sequence
  HTT spacer sequence TTCN PAM
cucacuacaucuauuccuaa

SEQ ID NO: 35361 - RNA, 20 nt, Artificial Sequence
  HTT spacer sequence TTCN PAM
gauaugucaaaaauucugau

SEQ ID NO: 35362 - RNA, 20 nt, Artificial Sequence
  HTT spacer sequence TTCN PAM
gauuggaaauggaauauuua

SEQ ID NO: 35363 - RNA, 20 nt, Artificial Sequence
  HTT spacer sequence TTCN PAM
aaucagaauuuuugacauau

SEQ ID NO: 35364 - RNA, 20 nt, Artificial Sequence
  HTT spacer sequence TTCN PAM
auuuccaaucagaauuuuug

SEQ ID NO: 35365 - RNA, 20 nt, Artificial Sequence
  HTT spacer sequence TTCN PAM
aaauguaaauauuccauuuc

SEQ ID NO: 35366 - RNA, 20 nt, Artificial Sequence
  HTT spacer sequence TTCN PAM
cucgccuuuagcucuuccaa

SEQ ID NO: 35367 - RNA, 20 nt, Artificial Sequence
  HTT spacer sequence TTCN PAM
caaguuuggaggaccuuuuu

SEQ ID NO: 35368 - RNA, 20 nt, Artificial Sequence
  HTT spacer sequence TTCN PAM
uggguaaaaaaagguccucc

SEQ ID NO: 35369 - RNA, 20 nt, Artificial Sequence
  HTT spacer sequence TTCN PAM
gaccuuuucauggguaaaaa

SEQ ID NO: 35370 - RNA, 20 nt, Artificial Sequence
  HTT spacer sequence TTCN PAM
guucugaccuuuucaugggu

SEQ ID NO: 35371 - RNA, 20 nt, Artificial Sequence
  HTT spacer sequence TTCN PAM
auaaacugcagucacaccua

SEQ ID NO: 35372 - RNA, 20 nt, Artificial Sequence
  HTT spacer sequence TTCN PAM
cauccauacugcucucggug

SEQ ID NO: 35373 - RNA, 20 nt, Artificial Sequence
  HTT spacer sequence TTCN PAM
ugcuuugccaggcuccucuc

SEQ ID NO: 35374 - RNA, 20 nt, Artificial Sequence
  HTT spacer sequence TTCN PAM
cacgcugucucuuggcaccc

SEQ ID NO: 35375 - RNA, 20 nt, Artificial Sequence
  HTT spacer sequence TTCN PAM
cccauuuguuuuguguauau

SEQ ID NO: 35376 - RNA, 20 nt, Artificial Sequence
  HTT spacer sequence TTCN PAM
agcaauucuccugccucagc

SEQ ID NO: 35377 - RNA, 20 nt, Artificial Sequence
  HTT spacer sequence TTCN PAM
ccugccucagccuccugagu

SEQ ID NO: 35378 - RNA, 20 nt, Artificial Sequence
  HTT spacer sequence TTCN PAM
ccuuguuggccaggaugguc

SEQ ID NO: 35379 - RNA, 20 nt, Artificial Sequence
  HTT spacer sequence TTCN PAM
aacaucauguuguauauuac

SEQ ID NO: 35380 - RNA, 20 nt, Artificial Sequence
  HTT spacer sequence TTCN PAM
agaccaaacuggccagcaug

SEQ ID NO: 35381 - RNA, 20 nt, Artificial Sequence
  HTT spacer sequence TTCN PAM
ccaugcuggccaguuugguc

SEQ ID NO: 35382 - RNA, 20 nt, Artificial Sequence
  HTT spacer sequence TTCN PAM
ccugccucagccucccaagu

SEQ ID NO: 35383 - RNA, 20 nt, Artificial Sequence
  HTT spacer sequence TTCN PAM
agcaauucuccugccucagc

SEQ ID NO: 35384 - RNA, 20 nt, Artificial Sequence
  HTT spacer sequence TTCN PAM
ugccacugcacucuagccug

SEQ ID NO: 35385 - RNA, 20 nt, Artificial Sequence
  HTT spacer sequence TTCN PAM
uuuuuuuuuuuuuuugagac

SEQ ID NO: 35386 - RNA, 20 nt, Artificial Sequence
  HTT spacer sequence TTCN PAM
ucuuuuuuuuuuuuuuuuga

SEQ ID NO: 35387 - RNA, 20 nt, Artificial Sequence
  HTT spacer sequence TTCN PAM
acaaugcauauguauuucuu

SEQ ID NO: 35388 - RNA, 20 nt, Artificial Sequence
  HTT spacer sequence TTCN PAM
caccacaaaacaaugauacg

SEQ ID NO: 35389 - RNA, 20 nt, Artificial Sequence
  HTT spacer sequence TTCN PAM
gugauuuucuugcauauggu

SEQ ID NO: 35390 - RNA, 20 nt, Artificial Sequence
  HTT spacer sequence TTCN PAM
ugcauaugguacauugcuau

SEQ ID NO: 35391 - RNA, 20 nt, Artificial Sequence
  HTT spacer sequence TTCN PAM
agagaucuacuguauagcau

SEQ ID NO: 35392 - RNA, 20 nt, Artificial Sequence
  HTT spacer sequence TTCN PAM
uccugucuauaaaugaaauu

SEQ ID NO: 35393 - RNA, 20 nt, Artificial Sequence
  HTT spacer sequence TTCN PAM
uuuauagacaggaggaauga

SEQ ID NO: 35394 - RNA, 20 nt, Artificial Sequence
  HTT spacer sequence TTCN PAM
agguuuuuuuugagauggag

SEQ ID NO: 35395 - RNA, 20 nt, Artificial Sequence
  HTT spacer sequence TTCN PAM
ucacccaggcuggaguacca

SEQ ID NO: 35396 - RNA, 20 nt, Artificial Sequence
  HTT spacer sequence TTCN PAM
cccaggcuggaguaccaugg

SEQ ID NO: 35397 - RNA, 20 nt, Artificial Sequence
  HTT spacer sequence TTCN PAM
agcaauucuccugccucagc

SEQ ID NO: 35398 - RNA, 20 nt, Artificial Sequence
  HTT spacer sequence TTCN PAM
ccugccucagccuccugagu

SEQ ID NO: 35399 - RNA, 20 nt, Artificial Sequence
  HTT spacer sequence TTCN PAM
acuaaaaauacaaaaauuag

SEQ ID NO: 35400 - RNA, 20 nt, Artificial Sequence
  HTT spacer sequence TTCN PAM
ccauguuggccaggcugguc

SEQ ID NO: 35401 - RNA, 20 nt, Artificial Sequence
  HTT spacer sequence TTCN PAM
agaccagccuggccaacaug

SEQ ID NO: 35402 - RNA, 20 nt, Artificial Sequence
  HTT spacer sequence TTCN PAM
aaggauugacuguaguacag

SEQ ID NO: 35403 - RNA, 20 nt, Artificial Sequence
  HTT spacer sequence TTCN PAM
uccuguacuacagucaaucc

SEQ ID NO: 35404 - RNA, 20 nt, Artificial Sequence
  HTT spacer sequence TTCN PAM
acaggucaaucuuccuccug

SEQ ID NO: 35405 - RNA, 20 nt, Artificial Sequence
  HTT spacer sequence TTCN PAM
gaugaauuaaauaaacuaag

SEQ ID NO: 35406 - RNA, 20 nt, Artificial Sequence
  HTT spacer sequence TTCN PAM
ucagaaagaugauaguaaua

SEQ ID NO: 35407 - RNA, 20 nt, Artificial Sequence
  HTT spacer sequence TTCN PAM
aacugaaguagaauaguugu

SEQ ID NO: 35408 - RNA, 20 nt, Artificial Sequence
  HTT spacer sequence TTCN PAM
guuugaagacuuuugacuug

SEQ ID NO: 35409 - RNA, 20 nt, Artificial Sequence
  HTT spacer sequence TTCN PAM
acuucaguuugaagacuuuu

SEQ ID NO: 35410 - RNA, 20 nt, Artificial Sequence
  HTT spacer sequence TTCN PAM
ugagcacaccaaguaaucaa

SEQ ID NO: 35411 - RNA, 20 nt, Artificial Sequence
  HTT spacer sequence TTCN PAM
uuaguggccaacaacuucau

SEQ ID NO: 35412 - RNA, 20 nt, Artificial Sequence
  HTT spacer sequence TTCN PAM
ggaauuggccagugguccuu

SEQ ID NO: 35413 - RNA, 20 nt, Artificial Sequence
  HTT spacer sequence TTCN PAM
agaaccucucugagccuaag

SEQ ID NO: 35414 - RNA, 20 nt, Artificial Sequence
  HTT spacer sequence TTCN PAM
aggaccacuggccaauucca

SEQ ID NO: 35415 - RNA, 20 nt, Artificial Sequence
  HTT spacer sequence TTCN PAM
cuaacugauuucucacaaag

SEQ ID NO: 35416 - RNA, 20 nt, Artificial Sequence
  HTT spacer sequence TTCN PAM
cacaaagcaaacaagcaauc

SEQ ID NO: 35417 - RNA, 20 nt, Artificial Sequence
  HTT spacer sequence TTCN PAM
uauuuuguuauuuaaaaagu

SEQ ID NO: 35418 - RNA, 20 nt, Artificial Sequence
  HTT spacer sequence TTCN PAM
cauuacuucuaguuaaucaa

SEQ ID NO: 35419 - RNA, 20 nt, Artificial Sequence
  HTT spacer sequence TTCN PAM
aguuaaucaaaaggucagag

SEQ ID NO: 35420 - RNA, 20 nt, Artificial Sequence
  HTT spacer sequence TTCN PAM
ucugaccuuuugauuaacua

SEQ ID NO: 35421 - RNA, 20 nt, Artificial Sequence
  HTT spacer sequence TTCN PAM
aguauuuccucugaccuuuu

SEQ ID NO: 35422 - RNA, 20 nt, Artificial Sequence
  HTT spacer sequence TTCN PAM
uacuagaauacuuuaaaaaa

SEQ ID NO: 35423 - RNA, 20 nt, Artificial Sequence
  HTT spacer sequence TTCN PAM
aguaugaaaauauucaagua

SEQ ID NO: 35424 - RNA, 20 nt, Artificial Sequence
  HTT spacer sequence TTCN PAM
aguaaucucuuuaaaacuug

SEQ ID NO: 35425 - RNA, 20 nt, Artificial Sequence
  HTT spacer sequence TTCN PAM
agacaaucugauaccucagg

SEQ ID NO: 35426 - RNA, 20 nt, Artificial Sequence
  HTT spacer sequence TTCN PAM
aucaucuuccuucauaccuc

SEQ ID NO: 35427 - RNA, 20 nt, Artificial Sequence
  HTT spacer sequence TTCN PAM
uucauaccucaaacugcaug

SEQ ID NO: 35428 - RNA, 20 nt, Artificial Sequence
  HTT spacer sequence TTCN PAM
uaccucaaacugcaugaugu

SEQ ID NO: 35429 - RNA, 20 nt, Artificial Sequence
  HTT spacer sequence TTCN PAM
ggacaucaugcaguuugagg

SEQ ID NO: 35430 - RNA, 20 nt, Artificial Sequence
  HTT spacer sequence TTCN PAM
uaugauuuguaggauguaua

SEQ ID NO: 35431 - RNA, 20 nt, Artificial Sequence
  HTT spacer sequence TTCN PAM
aguuuguuugucuuucagcu

SEQ ID NO: 35432 - RNA, 20 nt, Artificial Sequence
  HTT spacer sequence TTCN PAM
gcuuuguuuaugauagcuuc

SEQ ID NO: 35433 - RNA, 20 nt, Artificial Sequence
  HTT spacer sequence TTCN PAM
aucauacagguguuuuggau

SEQ ID NO: 35434 - RNA, 20 nt, Artificial Sequence
  HTT spacer sequence TTCN PAM
uauuguuuguacucacagcu

SEQ ID NO: 35435 - RNA, 20 nt, Artificial Sequence
  HTT spacer sequence TTCN PAM
cccuauaaccuggcugcaca

SEQ ID NO: 35436 - RNA, 20 nt, Artificial Sequence
  HTT spacer sequence TTCN PAM
uucccucccgugaggcucac

SEQ ID NO: 35437 - RNA, 20 nt, Artificial Sequence
  HTT spacer sequence TTCN PAM
cucccgugaggcucacacaa

SEQ ID NO: 35438 - RNA, 20 nt, Artificial Sequence
  HTT spacer sequence TTCN PAM
agacucacagaagaaaagca

SEQ ID NO: 35439 - RNA, 20 nt, Artificial Sequence
  HTT spacer sequence TTCN PAM
gugagucuggaauuguggcu

SEQ ID NO: 35440 - RNA, 20 nt, Artificial Sequence
  HTT spacer sequence TTCN PAM
ucugugagucuggaauugug

SEQ ID NO: 35441 - RNA, 20 nt, Artificial Sequence
  HTT spacer sequence TTCN PAM
gcauaaaccauguguuucaa

SEQ ID NO: 35442 - RNA, 20 nt, Artificial Sequence
  HTT spacer sequence TTCN PAM
aauagucugggcauggugag

SEQ ID NO: 35443 - RNA, 20 nt, Artificial Sequence
  HTT spacer sequence TTCN PAM
cuagcugauaacaaguggcu

SEQ ID NO: 35444 - RNA, 20 nt, Artificial Sequence
  HTT spacer sequence TTCN PAM
uacgcugacauaaacuuucc

SEQ ID NO: 35445 - RNA, 20 nt, Artificial Sequence
  HTT spacer sequence TTCN PAM
ccagauacccccaagagcca

SEQ ID NO: 35446 - RNA, 20 nt, Artificial Sequence
  HTT spacer sequence TTCN PAM
gucuagggauguuuuaguuu

SEQ ID NO: 35447 - RNA, 20 nt, Artificial Sequence
  HTT spacer sequence TTCN PAM
uuuuuuuuuuuaacuuuaaa

SEQ ID NO: 35448 - RNA, 20 nt, Artificial Sequence
  HTT spacer sequence TTCN PAM
guucaucugcaauuuguuag

SEQ ID NO: 35449 - RNA, 20 nt, Artificial Sequence
  HTT spacer sequence TTCN PAM
ucugcaauuuguuagauaug

SEQ ID NO: 35450 - RNA, 20 nt, Artificial Sequence
  HTT spacer sequence TTCN PAM
uaucuaacaaauugcagaug

SEQ ID NO: 35451 - RNA, 20 nt, Artificial Sequence
  HTT spacer sequence TTCN PAM
guaaacauuauuggggacaa

SEQ ID NO: 35452 - RNA, 20 nt, Artificial Sequence
  HTT spacer sequence TTCN PAM
ucuguaaacauuauugggga

SEQ ID NO: 35453 - RNA, 20 nt, Artificial Sequence
  HTT spacer sequence TTCN PAM
gcacuaauuggcuugaguua

SEQ ID NO: 35454 - RNA, 20 nt, Artificial Sequence
  HTT spacer sequence TTCN PAM
cauaguucucuaguuucagu

SEQ ID NO: 35455 - RNA, 20 nt, Artificial Sequence
  HTT spacer sequence TTCN PAM
cuaguuucaguaguuucauu

SEQ ID NO: 35456 - RNA, 20 nt, Artificial Sequence
  HTT spacer sequence TTCN PAM
guaguuucauuuauuauuuu

SEQ ID NO: 35457 - RNA, 20 nt, Artificial Sequence
  HTT spacer sequence TTCN PAM
uuuauuauuuuguuauauca

SEQ ID NO: 35458 - RNA, 20 nt, Artificial Sequence
  HTT spacer sequence TTCN PAM
aauagaugagcagacagaua

SEQ ID NO: 35459 - RNA, 20 nt, Artificial Sequence
  HTT spacer sequence TTCN PAM
uuuuuagacagagucuugcu

SEQ ID NO: 35460 - RNA, 20 nt, Artificial Sequence
  HTT spacer sequence TTCN PAM
uaauuauuguagcuuaaugg

SEQ ID NO: 35461 - RNA, 20 nt, Artificial Sequence
  HTT spacer sequence TTCN PAM
ccuguuguucuuuagaauuu

SEQ ID NO: 35462 - RNA, 20 nt, Artificial Sequence
  HTT spacer sequence TTCN PAM
uuagaauuuucuggauauuc

SEQ ID NO: 35463 - RNA, 20 nt, Artificial Sequence
  HTT spacer sequence TTCN PAM
aaagaacaacaggggaacug

SEQ ID NO: 35464 - RNA, 20 nt, Artificial Sequence
  HTT spacer sequence TTCN PAM
ggauauucuucuuuauugau

SEQ ID NO: 35465 - RNA, 20 nt, Artificial Sequence
  HTT spacer sequence TTCN PAM
ucuuuauugauuuugggaug

SEQ ID NO: 35466 - RNA, 20 nt, Artificial Sequence
  HTT spacer sequence TTCN PAM
uuauugauuuugggauguga

SEQ ID NO: 35467 - RNA, 20 nt, Artificial Sequence
  HTT spacer sequence TTCN PAM
caucccaaaaucaauaaaga

SEQ ID NO: 35468 - RNA, 20 nt, Artificial Sequence
  HTT spacer sequence TTCN PAM
auuguucacaucccaaaauc

SEQ ID NO: 35469 - RNA, 20 nt, Artificial Sequence
  HTT spacer sequence TTCN PAM
acuuguagauugauuuaggg

SEQ ID NO: 35470 - RNA, 20 nt, Artificial Sequence
  HTT spacer sequence TTCN PAM
cccuaaaucaaucuacaagu

SEQ ID NO: 35471 - RNA, 20 nt, Artificial Sequence
  HTT spacer sequence TTCN PAM
ggacagggugacuuaacauc

SEQ ID NO: 35472 - RNA, 20 nt, Artificial Sequence
  HTT spacer sequence TTCN PAM
uauuuguucagaacuuuuua

SEQ ID NO: 35473 - RNA, 20 nt, Artificial Sequence
  HTT spacer sequence TTCN PAM
gaacuuuuuaaauuaccuca

SEQ ID NO: 35474 - RNA, 20 nt, Artificial Sequence
  HTT spacer sequence TTCN PAM
gaacaaauaggaaagcaucc

SEQ ID NO: 35475 - RNA, 20 nt, Artificial Sequence
  HTT spacer sequence TTCN PAM
gagguaauuuaaaaaguucu

SEQ ID NO: 35476 - RNA, 20 nt, Artificial Sequence
  HTT spacer sequence TTCN PAM
ugugcuucugagguaauuua

SEQ ID NO: 35477 - RNA, 20 nt, Artificial Sequence
  HTT spacer sequence TTCN PAM
cauagcucuugcacauuucu

SEQ ID NO: 35478 - RNA, 20 nt, Artificial Sequence
  HTT spacer sequence TTCN PAM
ugauaaaugaauccucaggu

SEQ ID NO: 35479 - RNA, 20 nt, Artificial Sequence
  HTT spacer sequence TTCN PAM
uuuaucaagaaaugugcaag

SEQ ID NO: 35480 - RNA, 20 nt, Artificial Sequence
  HTT spacer sequence TTCN PAM
ucuguuuuuguuacuaauag

SEQ ID NO: 35481 - RNA, 20 nt, Artificial Sequence
  HTT spacer sequence TTCN PAM
uauggguuuuuuuuccccug

SEQ ID NO: 35482 - RNA, 20 nt, Artificial Sequence
  HTT spacer sequence TTCN PAM
ccugaaaaucauuuaucaaa

SEQ ID NO: 35483 - RNA, 20 nt, Artificial Sequence
  HTT spacer sequence TTCN PAM
ggggaaaaaaaacccauaag

SEQ ID NO: 35484 - RNA, 20 nt, Artificial Sequence
  HTT spacer sequence TTCN PAM
gaaggauguuugauaauuuu

SEQ ID NO: 35485 - RNA, 20 nt, Artificial Sequence
  HTT spacer sequence TTCN PAM
gaaaauaagccacauacguu

SEQ ID NO: 35486 - RNA, 20 nt, Artificial Sequence
  HTT spacer sequence TTCN PAM
aaaauuaucaaacauccuuc

SEQ ID NO: 35487 - RNA, 20 nt, Artificial Sequence
  HTT spacer sequence TTCN PAM
uaucuuccaaaauuaucaaa

SEQ ID NO: 35488 - RNA, 20 nt, Artificial Sequence
  HTT spacer sequence TTCN PAM
uauuuuacaagguuugaggu

SEQ ID NO: 35489 - RNA, 20 nt, Artificial Sequence
  HTT spacer sequence TTCN PAM
caugucagcucccaaagcag

SEQ ID NO: 35490 - RNA, 20 nt, Artificial Sequence
  HTT spacer sequence TTCN PAM
gcuuugggagcugacaugag

SEQ ID NO: 35491 - RNA, 20 nt, Artificial Sequence
  HTT spacer sequence TTCN PAM
acaugccgucuucugcuuug

SEQ ID NO: 35492 - RNA, 20 nt, Artificial Sequence
  HTT spacer sequence TTCN PAM
cuacggcauuuuucaacaug

SEQ ID NO: 35493 - RNA, 20 nt, Artificial Sequence
  HTT spacer sequence TTCN PAM
uuuccaccuguuuucaacuc

SEQ ID NO: 35494 - RNA, 20 nt, Artificial Sequence
  HTT spacer sequence TTCN PAM
accuguuuucaacucauauc

SEQ ID NO: 35495 - RNA, 20 nt, Artificial Sequence
  HTT spacer sequence TTCN PAM
acucauaucaucuugaauuu

SEQ ID NO: 35496 - RNA, 20 nt, Artificial Sequence
  HTT spacer sequence TTCN PAM
agaugauaugaguugaaaac

SEQ ID NO: 35497 - RNA, 20 nt, Artificial Sequence
  HTT spacer sequence TTCN PAM
gggcaccuuuccaugcuccu

SEQ ID NO: 35498 - RNA, 20 nt, Artificial Sequence
  HTT spacer sequence TTCN PAM
augcuccuagugcuugcuau

SEQ ID NO: 35499 - RNA, 20 nt, Artificial Sequence
  HTT spacer sequence TTCN PAM
uuccugaauacccugaacuc

SEQ ID NO: 35500 - RNA, 20 nt, Artificial Sequence
  HTT spacer sequence TTCN PAM
ugaauacccugaacuccagc

SEQ ID NO: 35501 - RNA, 20 nt, Artificial Sequence
  HTT spacer sequence TTCN PAM
ggaaggaaaauaauaaacag

SEQ ID NO: 35502 - RNA, 20 nt, Artificial Sequence
  HTT spacer sequence TTCN PAM
ggguauucaggaaggaaaau

SEQ ID NO: 35503 - RNA, 20 nt, Artificial Sequence
  HTT spacer sequence TTCN PAM
gcuguaauucuggccucccu

SEQ ID NO: 35504 - RNA, 20 nt, Artificial Sequence
  HTT spacer sequence TTCN PAM
ggccucccuggcaucuugga

SEQ ID NO: 35505 - RNA, 20 nt, Artificial Sequence
  HTT spacer sequence TTCN PAM
uuugcucugucauccccgcg

SEQ ID NO: 35506 - RNA, 20 nt, Artificial Sequence
  HTT spacer sequence TTCN PAM
cagcugaagugcguuuggag

SEQ ID NO: 35507 - RNA, 20 nt, Artificial Sequence
  HTT spacer sequence TTCN PAM
gcugagaagcugcgcagcag

SEQ ID NO: 35508 - RNA, 20 nt, Artificial Sequence
  HTT spacer sequence TTCN PAM
uugguuccuucugcugaguu

SEQ ID NO: 35509 - RNA, 20 nt, Artificial Sequence
  HTT spacer sequence TTCN PAM
uucugcugaguugcucagcg

SEQ ID NO: 35510 - RNA, 20 nt, Artificial Sequence
  HTT spacer sequence TTCN PAM
gcugaguugcucagcgucuc

SEQ ID NO: 35511 - RNA, 20 nt, Artificial Sequence
  HTT spacer sequence TTCN PAM
uguguggcccuuccugcacu

SEQ ID NO: 35512 - RNA, 20 nt, Artificial Sequence
  HTT spacer sequence TTCN PAM
ugcacuccucugauuccuuu

SEQ ID NO: 35513 - RNA, 20 nt, Artificial Sequence
  HTT spacer sequence TTCN PAM
uuuugucuucccugguuucu

SEQ ID NO: 35514 - RNA, 20 nt, Artificial Sequence
  HTT spacer sequence TTCN PAM
cugguuucuugcuuugguuu

SEQ ID NO: 35515 - RNA, 20 nt, Artificial Sequence
  HTT spacer sequence TTCN PAM
ugcuuugguuucgagucucc

SEQ ID NO: 35516 - RNA, 20 nt, Artificial Sequence
  HTT spacer sequence TTCN PAM
agucuccacagaacuuuugc

SEQ ID NO: 35517 - RNA, 20 nt, Artificial Sequence
  HTT spacer sequence TTCN PAM
guggagacucgaaaccaaag

SEQ ID NO: 35518 - RNA, 20 nt, Artificial Sequence
  HTT spacer sequence TTCN PAM
gaagaccuggaagcuuuuuc

SEQ ID NO: 35519 - RNA, 20 nt, Artificial Sequence
  HTT spacer sequence TTCN PAM
gaagagcugcaaaaguucug

SEQ ID NO: 35520 - RNA, 20 nt, Artificial Sequence
  HTT spacer sequence TTCN PAM
aggucuucagaagagcugca

SEQ ID NO: 35521 - RNA, 20 nt, Artificial Sequence
  HTT spacer sequence TTCN PAM
ucuuaauucucaucucauga

SEQ ID NO: 35522 - RNA, 20 nt, Artificial Sequence
  HTT spacer sequence TTCN PAM
caucucaugaccucuuuucc

SEQ ID NO: 35523 - RNA, 20 nt, Artificial Sequence
  HTT spacer sequence TTCN PAM
cuucuuugagagcuagaacu

SEQ ID NO: 35524 - RNA, 20 nt, Artificial Sequence
  HTT spacer sequence TTCN PAM
uugagagcuagaacuuccca

SEQ ID NO: 35525 - RNA, 20 nt, Artificial Sequence
  HTT spacer sequence TTCN PAM
agcucucaaagaagggaaaa

SEQ ID NO: 35526 - RNA, 20 nt, Artificial Sequence
  HTT spacer sequence TTCN PAM
cauggugaacuucucuuucc

SEQ ID NO: 35527 - RNA, 20 nt, Artificial Sequence
  HTT spacer sequence TTCN PAM
ccaugggaaguucuagcucu

SEQ ID NO: 35528 - RNA, 20 nt, Artificial Sequence
  HTT spacer sequence TTCN PAM
cuuuccagaauuccaugccu

SEQ ID NO: 35529 - RNA, 20 nt, Artificial Sequence
  HTT spacer sequence TTCN PAM
agaauuccaugccuucuuuu

SEQ ID NO: 35530 - RNA, 20 nt, Artificial Sequence
  HTT spacer sequence TTCN PAM
ggaaagagaaguucaccaug

SEQ ID NO: 35531 - RNA, 20 nt, Artificial Sequence
  HTT spacer sequence TTCN PAM
augccuucuuuucccuccca

SEQ ID NO: 35532 - RNA, 20 nt, Artificial Sequence
  HTT spacer sequence TTCN PAM
uuucccucccacuuaccugu

SEQ ID NO: 35533 - RNA, 20 nt, Artificial Sequence
  HTT spacer sequence TTCN PAM
cucccacuuaccuguugucc

SEQ ID NO: 35534 - RNA, 20 nt, Artificial Sequence
  HTT spacer sequence TTCN PAM
ccuccaauaugcacagcaau

SEQ ID NO: 35535 - RNA, 20 nt, Artificial Sequence
  HTT spacer sequence TTCN PAM
ucccugggcucuucaucuca

SEQ ID NO: 35536 - RNA, 20 nt, Artificial Sequence
  HTT spacer sequence TTCN PAM
cugggcucuucaucucacau

SEQ ID NO: 35537 - RNA, 20 nt, Artificial Sequence
  HTT spacer sequence TTCN PAM
ucucacaugacaucaccaca

SEQ ID NO: 35538 - RNA, 20 nt, Artificial Sequence
  HTT spacer sequence TTCN PAM
uuggacccucagugguguca

SEQ ID NO: 35539 - RNA, 20 nt, Artificial Sequence
  HTT spacer sequence TTCN PAM
uuccuuuggcuggccuuagg

SEQ ID NO: 35540 - RNA, 20 nt, Artificial Sequence
  HTT spacer sequence TTCN PAM
uuuggcuggccuuagggcac

SEQ ID NO: 35541 - RNA, 20 nt, Artificial Sequence
  HTT spacer sequence TTCN PAM
guuucugugucugucucuug

SEQ ID NO: 35542 - RNA, 20 nt, Artificial Sequence
  HTT spacer sequence TTCN PAM
gugucugucucuugccugcu

SEQ ID NO: 35543 - RNA, 20 nt, Artificial Sequence
  HTT spacer sequence TTCN PAM
gacuucgcccagagaaagcu

SEQ ID NO: 35544 - RNA, 20 nt, Artificial Sequence
  HTT spacer sequence TTCN PAM
cccagagaaagcuucucuuu

SEQ ID NO: 35545 - RNA, 20 nt, Artificial Sequence
  HTT spacer sequence TTCN PAM
cugggcgaagucagaagcag

SEQ ID NO: 35546 - RNA, 20 nt, Artificial Sequence
  HTT spacer sequence TTCN PAM
cuuucacaaggguucuuaga

SEQ ID NO: 35547 - RNA, 20 nt, Artificial Sequence
  HTT spacer sequence TTCN PAM
caaggguucuuagauuuaug

SEQ ID NO: 35548 - RNA, 20 nt, Artificial Sequence
  HTT spacer sequence TTCN PAM
uagauuuauguucacugagc

SEQ ID NO: 35549 - RNA, 20 nt, Artificial Sequence
  HTT spacer sequence TTCN PAM
cugagcaccuucuuuucuga

SEQ ID NO: 35550 - RNA, 20 nt, Artificial Sequence
  HTT spacer sequence TTCN PAM
uuucugaggcaguguuuuac

SEQ ID NO: 35551 - RNA, 20 nt, Artificial Sequence
  HTT spacer sequence TTCN PAM
gaggcaguguuuuaccaaua

SEQ ID NO: 35552 - RNA, 20 nt, Artificial Sequence
  HTT spacer sequence TTCN PAM
uagucagucucgccuuaccu

SEQ ID NO: 35553 - RNA, 20 nt, Artificial Sequence
  HTT spacer sequence TTCN PAM
uguuaugcaugucuuugguc

SEQ ID NO: 35554 - RNA, 20 nt, Artificial Sequence
  HTT spacer sequence TTCN PAM
cugagucuguaaaauagaau

SEQ ID NO: 35555 - RNA, 20 nt, Artificial Sequence
  HTT spacer sequence TTCN PAM
auuuuacagacucagagaau

SEQ ID NO: 35556 - RNA, 20 nt, Artificial Sequence
  HTT spacer sequence TTCN PAM
uguaauuaaauuauacagca

SEQ ID NO: 35557 - RNA, 20 nt, Artificial Sequence
  HTT spacer sequence TTCN PAM
aaaggauuucauguaauuaa

SEQ ID NO: 35558 - RNA, 20 nt, Artificial Sequence
  HTT spacer sequence TTCN PAM
auuuggauacaauaaaauau

SEQ ID NO: 35559 - RNA, 20 nt, Artificial Sequence
  HTT spacer sequence TTCN PAM
cauaggguugguucaauuug

SEQ ID NO: 35560 - RNA, 20 nt, Artificial Sequence
  HTT spacer sequence TTCN PAM
cccagggauccuaguguaua

SEQ ID NO: 35561 - RNA, 20 nt, Artificial Sequence
  HTT spacer sequence TTCN PAM
uuauacacuaggaucccugg

SEQ ID NO: 35562 - RNA, 20 nt, Artificial Sequence
  HTT spacer sequence TTCN PAM
auuuuuugauauaccacaua

SEQ ID NO: 35563 - RNA, 20 nt, Artificial Sequence
  HTT spacer sequence TTCN PAM
cauuaugaaagaaaguuagg

SEQ ID NO: 35564 - RNA, 20 nt, Artificial Sequence
  HTT spacer sequence TTCN PAM
uaaugagaaaaaaggguuaa

SEQ ID NO: 35565 - RNA, 20 nt, Artificial Sequence
  HTT spacer sequence TTCN PAM
uucauaaugagaaaaaaggg

SEQ ID NO: 35566 - RNA, 20 nt, Artificial Sequence
  HTT spacer sequence TTCN PAM
uaacuuucuuucauaaugag

SEQ ID NO: 35567 - RNA, 20 nt, Artificial Sequence
  HTT spacer sequence TTCN PAM
uccaguagcgccaguguaac

SEQ ID NO: 35568 - RNA, 20 nt, Artificial Sequence
  HTT spacer sequence TTCN PAM
aguagcgccaguguaaccug

SEQ ID NO: 35569 - RNA, 20 nt, Artificial Sequence
  HTT spacer sequence TTCN PAM
gguuacacuggcgcuacugg

SEQ ID NO: 35570 - RNA, 20 nt, Artificial Sequence
  HTT spacer sequence TTCN PAM
aaggcuuucagguuacacug

SEQ ID NO: 35571 - RNA, 20 nt, Artificial Sequence
  HTT spacer sequence TTCN PAM
gauagcuauacaaaaacuac

SEQ ID NO: 35572 - RNA, 20 nt, Artificial Sequence
  HTT spacer sequence TTCN PAM
uuucagauagcuauacaaaa

SEQ ID NO: 35573 - RNA, 20 nt, Artificial Sequence
  HTT spacer sequence TTCN PAM
uuccaaaauauuuuuccagu

SEQ ID NO: 35574 - RNA, 20 nt, Artificial Sequence
  HTT spacer sequence TTCN PAM
aaaauauuuuuccagugcug

SEQ ID NO: 35575 - RNA, 20 nt, Artificial Sequence
  HTT spacer sequence TTCN PAM
agugcugacaacaaacacgc

SEQ ID NO: 35576 - RNA, 20 nt, Artificial Sequence
  HTT spacer sequence TTCN PAM
cuccuucaccuucccaaggu

SEQ ID NO: 35577 - RNA, 20 nt, Artificial Sequence
  HTT spacer sequence TTCN PAM
ccuucccaaggucacgcugg

SEQ ID NO: 35578 - RNA, 20 nt, Artificial Sequence
  HTT spacer sequence TTCN PAM
caaggucacgcuggaucuuc

SEQ ID NO: 35579 - RNA, 20 nt, Artificial Sequence
  HTT spacer sequence TTCN PAM
gaacagcacggaaaaguuug

SEQ ID NO: 35580 - RNA, 20 nt, Artificial Sequence
  HTT spacer sequence TTCN PAM
gaagauccagcgugaccuug

SEQ ID NO: 35581 - RNA, 20 nt, Artificial Sequence
  HTT spacer sequence TTCN PAM
gugcuguucugaagauccag

SEQ ID NO: 35582 - RNA, 20 nt, Artificial Sequence
  HTT spacer sequence TTCN PAM
ccgcucagccuuggauguuc

SEQ ID NO: 35583 - RNA, 20 nt, Artificial Sequence
  HTT spacer sequence TTCN PAM
uucucagauacuagagcugg

SEQ ID NO: 35584 - RNA, 20 nt, Artificial Sequence
  HTT spacer sequence TTCN PAM
cagauacuagagcuggccac

SEQ ID NO: 35585 - RNA, 20 nt, Artificial Sequence
  HTT spacer sequence TTCN PAM
caauguccugcaguguggcc

SEQ ID NO: 35586 - RNA, 20 nt, Artificial Sequence
  HTT spacer sequence TTCN PAM
ccuuggguuguggcuggcac

SEQ ID NO: 35587 - RNA, 20 nt, Artificial Sequence
  HTT spacer sequence TTCN PAM
gggcugaguucaucuaggau

SEQ ID NO: 35588 - RNA, 20 nt, Artificial Sequence
  HTT spacer sequence TTCN PAM
ucuaggauggagccugguuc

SEQ ID NO: 35589 - RNA, 20 nt, Artificial Sequence
  HTT spacer sequence TTCN PAM
ccagggugccuccgggagac

SEQ ID NO: 35590 - RNA, 20 nt, Artificial Sequence
  HTT spacer sequence TTCN PAM
uggcuaaggcagagucagac

SEQ ID NO: 35591 - RNA, 20 nt, Artificial Sequence
  HTT spacer sequence TTCN PAM
cccuaaacuucauggcuaag

SEQ ID NO: 35592 - RNA, 20 nt, Artificial Sequence
  HTT spacer sequence TTCN PAM
auuuguauucuauuuuuguc

SEQ ID NO: 35593 - RNA, 20 nt, Artificial Sequence
  HTT spacer sequence TTCN PAM
auuuuugucuguuaucaugu

SEQ ID NO: 35594 - RNA, 20 nt, Artificial Sequence
  HTT spacer sequence TTCN PAM
aaacuaaacugggucuaagc

SEQ ID NO: 35595 - RNA, 20 nt, Artificial Sequence
  HTT spacer sequence TTCN PAM
aaauguguuuguagaguccu

SEQ ID NO: 35596 - RNA, 20 nt, Artificial Sequence
  HTT spacer sequence TTCN PAM
uaacuugaccuuuucaagug

SEQ ID NO: 35597 - RNA, 20 nt, Artificial Sequence
  HTT spacer sequence TTCN PAM
aguggaaaggggcaaaacag

SEQ ID NO: 35598 - RNA, 20 nt, Artificial Sequence
  HTT spacer sequence TTCN PAM
acuugaaaaggucaaguuaa

SEQ ID NO: 35599 - RNA, 20 nt, Artificial Sequence
  HTT spacer sequence TTCN PAM
ucaggcacaaaagagcaagu

SEQ ID NO: 35600 - RNA, 20 nt, Artificial Sequence
  HTT spacer sequence TTCN PAM
cugacacagauagucucuga

SEQ ID NO: 35601 - RNA, 20 nt, Artificial Sequence
  HTT spacer sequence TTCN PAM
gugagauaagucagagacua

SEQ ID NO: 35602 - RNA, 20 nt, Artificial Sequence
  HTT spacer sequence TTCN PAM
uuuucuuuuuuuugguggcu

SEQ ID NO: 35603 - RNA, 20 nt, Artificial Sequence
  HTT spacer sequence TTCN PAM
uuuuuuugguggcuaauuuc

SEQ ID NO: 35604 - RNA, 20 nt, Artificial Sequence
  HTT spacer sequence TTCN PAM
guuuuauuuauauuuguuua

SEQ ID NO: 35605 - RNA, 20 nt, Artificial Sequence
  HTT spacer sequence TTCN PAM
ggguuacaugugcagaaugu

SEQ ID NO: 35606 - RNA, 20 nt, Artificial Sequence
  HTT spacer sequence TTCN PAM
gcacauguaacccagaacuu

SEQ ID NO: 35607 - RNA, 20 nt, Artificial Sequence
  HTT spacer sequence TTCN PAM
ccuaauguuaucccuccccc

SEQ ID NO: 35608 - RNA, 20 nt, Artificial Sequence
  HTT spacer sequence TTCN PAM
ccucccugugcccauguguu

SEQ ID NO: 35609 - RNA, 20 nt, Artificial Sequence
  HTT spacer sequence TTCN PAM
cauuguucaauuuccacuug

SEQ ID NO: 35610 - RNA, 20 nt, Artificial Sequence
  HTT spacer sequence TTCN PAM
auuuccacuugugagugaga

SEQ ID NO: 35611 - RNA, 20 nt, Artificial Sequence
  HTT spacer sequence TTCN PAM
acuugugagugagaacaugc

SEQ ID NO: 35612 - RNA, 20 nt, Artificial Sequence
  HTT spacer sequence TTCN PAM
cacucacaaguggaaauuga

SEQ ID NO: 35613 - RNA, 20 nt, Artificial Sequence
  HTT spacer sequence TTCN PAM
gaucuugugauaguuugcug

SEQ ID NO: 35614 - RNA, 20 nt, Artificial Sequence
  HTT spacer sequence TTCN PAM
cagcaaacuaucacaagauc

SEQ ID NO: 35615 - RNA, 20 nt, Artificial Sequence
  HTT spacer sequence TTCN PAM
agcaucauccaugugccugc

SEQ ID NO: 35616 - RNA, 20 nt, Artificial Sequence
  HTT spacer sequence TTCN PAM
uguccuuugcaggcacaugg

SEQ ID NO: 35617 - RNA, 20 nt, Artificial Sequence
  HTT spacer sequence TTCN PAM
augguguauaugugccacau

SEQ ID NO: 35618 - RNA, 20 nt, Artificial Sequence
  HTT spacer sequence TTCN PAM
uaauccagucuaucauugau

SEQ ID NO: 35619 - RNA, 20 nt, Artificial Sequence
  HTT spacer sequence TTCN PAM
gguugguuccaagucuuugc

SEQ ID NO: 35620 - RNA, 20 nt, Artificial Sequence
  HTT spacer sequence TTCN PAM
aagucuuugcuauugugacu

SEQ ID NO: 35621 - RNA, 20 nt, Artificial Sequence
  HTT spacer sequence TTCN PAM
acgauaaagacacaugcaca

SEQ ID NO: 35622 - RNA, 20 nt, Artificial Sequence
  HTT spacer sequence TTCN PAM
aguucuagaccuuugaggaa

SEQ ID NO: 35623 - RNA, 20 nt, Artificial Sequence
  HTT spacer sequence TTCN PAM
agaccuuugaggaaucgcca

SEQ ID NO: 35624 - RNA, 20 nt, Artificial Sequence
  HTT spacer sequence TTCN PAM
ucaaaggucuagaacuagaa

SEQ ID NO: 35625 - RNA, 20 nt, Artificial Sequence
  HTT spacer sequence TTCN PAM
acaauaguugaacuaauuua

SEQ ID NO: 35626 - RNA, 20 nt, Artificial Sequence
  HTT spacer sequence TTCN PAM
acuauuguggaagacagucu

SEQ ID NO: 35627 - RNA, 20 nt, Artificial Sequence
  HTT spacer sequence TTCN PAM
uauuuuuccacaaccucucc

SEQ ID NO: 35628 - RNA, 20 nt, Artificial Sequence
  HTT spacer sequence TTCN PAM
acaaccucuccagcaucugu

SEQ ID NO: 35629 - RNA, 20 nt, Artificial Sequence
  HTT spacer sequence TTCN PAM
ugacuuuuuaacgaucgcca

SEQ ID NO: 35630 - RNA, 20 nt, Artificial Sequence
  HTT spacer sequence TTCN PAM
cuaaugaccaguggugauga

SEQ ID NO: 35631 - RNA, 20 nt, Artificial Sequence
  HTT spacer sequence TTCN PAM
uaugucuguuggcugcauaa

SEQ ID NO: 35632 - RNA, 20 nt, Artificial Sequence
  HTT spacer sequence TTCN PAM
uuugcgaagugucuguucau

SEQ ID NO: 35633 - RNA, 20 nt, Artificial Sequence
  HTT spacer sequence TTCN PAM
caaaagaagacauuuaugca

SEQ ID NO: 35634 - RNA, 20 nt, Artificial Sequence
  HTT spacer sequence TTCN PAM
uauccuuuguccauuuuuug

SEQ ID NO: 35635 - RNA, 20 nt, Artificial Sequence
  HTT spacer sequence TTCN PAM
uaaauuuguuuaaguucuuu

SEQ ID NO: 35636 - RNA, 20 nt, Artificial Sequence
  HTT spacer sequence TTCN PAM
uuguagauucuggauguuaa

SEQ ID NO: 35637 - RNA, 20 nt, Artificial Sequence
  HTT spacer sequence TTCN PAM
ggauguuaaucuuuugucag

SEQ ID NO: 35638 - RNA, 20 nt, Artificial Sequence
  HTT spacer sequence TTCN PAM
guagguugccuguucacucu

SEQ ID NO: 35639 - RNA, 20 nt, Artificial Sequence
  HTT spacer sequence TTCN PAM
cucugaugauaguuucuuuu

SEQ ID NO: 35640 - RNA, 20 nt, Artificial Sequence
  HTT spacer sequence TTCN PAM
uuugcuaugcagaagcucuu

SEQ ID NO: 35641 - RNA, 20 nt, Artificial Sequence
  HTT spacer sequence TTCN PAM
gcauagcaaaagaaacuauc

SEQ ID NO: 35642 - RNA, 20 nt, Artificial Sequence
  HTT spacer sequence TTCN PAM
ugucuaaaacaccaaaagca

SEQ ID NO: 35643 - RNA, 20 nt, Artificial Sequence
  HTT spacer sequence TTCN PAM
ggacauaggcauaggcaaag

SEQ ID NO: 35644 - RNA, 20 nt, Artificial Sequence
  HTT spacer sequence TTCN PAM
ucuaggauuuuuaugguccu

SEQ ID NO: 35645 - RNA, 20 nt, Artificial Sequence
  HTT spacer sequence TTCN PAM
aggauuuuuaugguccuagg

SEQ ID NO: 35646 - RNA, 20 nt, Artificial Sequence
  HTT spacer sequence TTCN PAM
uuauaccuuacacaaaaauc

SEQ ID NO: 35647 - RNA, 20 nt, Artificial Sequence
  HTT spacer sequence TTCN PAM
guuuucugcauguggcuagc

SEQ ID NO: 35648 - RNA, 20 nt, Artificial Sequence
  HTT spacer sequence TTCN PAM
gcauguggcuagccaguuuu

SEQ ID NO: 35649 - RNA, 20 nt, Artificial Sequence
  HTT spacer sequence TTCN PAM
caacaccauuuauuaaauag

SEQ ID NO: 35650 - RNA, 20 nt, Artificial Sequence
  HTT spacer sequence TTCN PAM
cuauuuaauaaaugguguug

SEQ ID NO: 35651 - RNA, 20 nt, Artificial Sequence
  HTT spacer sequence TTCN PAM
ccauugcuuaugugugucag

SEQ ID NO: 35652 - RNA, 20 nt, Artificial Sequence
  HTT spacer sequence TTCN PAM
gaggccucuguucuguucca

SEQ ID NO: 35653 - RNA, 20 nt, Artificial Sequence
  HTT spacer sequence TTCN PAM
guuccauuggucuauauauc

SEQ ID NO: 35654 - RNA, 20 nt, Artificial Sequence
  HTT spacer sequence TTCN PAM
auuggucuauauaucuguuu

SEQ ID NO: 35655 - RNA, 20 nt, Artificial Sequence
  HTT spacer sequence TTCN PAM
aacuauacuacaacacuaca

SEQ ID NO: 35656 - RNA, 20 nt, Artificial Sequence
  HTT spacer sequence TTCN PAM
ucuagcccaggauugucuug

SEQ ID NO: 35657 - RNA, 20 nt, Artificial Sequence
  HTT spacer sequence TTCN PAM
agcccaggauugucuuggcu

SEQ ID NO: 35658 - RNA, 20 nt, Artificial Sequence
  HTT spacer sequence TTCN PAM
auaugaaguuuaaaauaguu

SEQ ID NO: 35659 - RNA, 20 nt, Artificial Sequence
  HTT spacer sequence TTCN PAM
uauggaaccaaaaaagagcc

SEQ ID NO: 35660 - RNA, 20 nt, Artificial Sequence
  HTT spacer sequence TTCN PAM
aauucugugaagaaagucag

SEQ ID NO: 35661 - RNA, 20 nt, Artificial Sequence
  HTT spacer sequence TTCN PAM
gugaagaaagucagugauag

SEQ ID NO: 35662 - RNA, 20 nt, Artificial Sequence
  HTT spacer sequence TTCN PAM
cagaauuggaaaaaacuauu

SEQ ID NO: 35663 - RNA, 20 nt, Artificial Sequence
  HTT spacer sequence TTCN PAM
ucacagaauuggaaaaaacu

SEQ ID NO: 35664 - RNA, 20 nt, Artificial Sequence
  HTT spacer sequence TTCN PAM
augcuauccccccaucaagc

SEQ ID NO: 35665 - RNA, 20 nt, Artificial Sequence
  HTT spacer sequence TTCN PAM
cgauauugauucguccuauc

SEQ ID NO: 35666 - RNA, 20 nt, Artificial Sequence
  HTT spacer sequence TTCN PAM
uccuauccaugaacauggaa

SEQ ID NO: 35667 - RNA, 20 nt, Artificial Sequence
  HTT spacer sequence TTCN PAM
uggauaggacgaaucaauau

SEQ ID NO: 35668 - RNA, 20 nt, Artificial Sequence
  HTT spacer sequence TTCN PAM
auguucauggauaggacgaa

SEQ ID NO: 35669 - RNA, 20 nt, Artificial Sequence
  HTT spacer sequence TTCN PAM
auuuguuuguguccucucuu

SEQ ID NO: 35670 - RNA, 20 nt, Artificial Sequence
  HTT spacer sequence TTCN PAM
uugagcagugguuuguaguu

SEQ ID NO: 35671 - RNA, 20 nt, Artificial Sequence
  HTT spacer sequence TTCN PAM
ccuugaagagguccuucaca

SEQ ID NO: 35672 - RNA, 20 nt, Artificial Sequence
  HTT spacer sequence TTCN PAM
aggagaacuacaaaccacug

SEQ ID NO: 35673 - RNA, 20 nt, Artificial Sequence
  HTT spacer sequence TTCN PAM
caucccuuguaaguugucuu

SEQ ID NO: 35674 - RNA, 20 nt, Artificial Sequence
  HTT spacer sequence TTCN PAM
uagguguuucauucccuuag

SEQ ID NO: 35675 - RNA, 20 nt, Artificial Sequence
  HTT spacer sequence TTCN PAM
uucccuuaguagcauuugug

SEQ ID NO: 35676 - RNA, 20 nt, Artificial Sequence
  HTT spacer sequence TTCN PAM
cuuaguagcauuugugaaug

SEQ ID NO: 35677 - RNA, 20 nt, Artificial Sequence
  HTT spacer sequence TTCN PAM
caaaugcuacuaagggaaug

SEQ ID NO: 35678 - RNA, 20 nt, Artificial Sequence
  HTT spacer sequence TTCN PAM
cucaugauuuggcucucugu

SEQ ID NO: 35679 - RNA, 20 nt, Artificial Sequence
  HTT spacer sequence TTCN PAM
uauacaccaauaacagacaa

SEQ ID NO: 35680 - RNA, 20 nt, Artificial Sequence
  HTT spacer sequence TTCN PAM
gcaaagucucaggauacaaa

SEQ ID NO: 35681 - RNA, 20 nt, Artificial Sequence
  HTT spacer sequence TTCN PAM
gcucaaaaucuccuuaagcu

SEQ ID NO: 35682 - RNA, 20 nt, Artificial Sequence
  HTT spacer sequence TTCN PAM
aaauauacaaucaugucauc

SEQ ID NO: 35683 - RNA, 20 nt, Artificial Sequence
  HTT spacer sequence TTCN PAM
ucucuuccuauuugaauacc

SEQ ID NO: 35684 - RNA, 20 nt, Artificial Sequence
  HTT spacer sequence TTCN PAM
uauuugaauacccuuuauug

SEQ ID NO: 35685 - RNA, 20 nt, Artificial Sequence
  HTT spacer sequence TTCN PAM
aauaggaagagaggaaguaa

SEQ ID NO: 35686 - RNA, 20 nt, Artificial Sequence
  HTT spacer sequence TTCN PAM
cuugccugauugcgcuggcc

SEQ ID NO: 35687 - RNA, 20 nt, Artificial Sequence
  HTT spacer sequence TTCN PAM
ggccagcgcaaucaggcaag

SEQ ID NO: 35688 - RNA, 20 nt, Artificial Sequence
  HTT spacer sequence TTCN PAM
aauacuauguugaauaggag

SEQ ID NO: 35689 - RNA, 20 nt, Artificial Sequence
  HTT spacer sequence TTCN PAM
acauaguauuggaaguucug

SEQ ID NO: 35690 - RNA, 20 nt, Artificial Sequence
  HTT spacer sequence TTCN PAM
aagggaaugcuuccaguuuu

SEQ ID NO: 35691 - RNA, 20 nt, Artificial Sequence
  HTT spacer sequence TTCN PAM
aaaaccggcacaagacaagg

SEQ ID NO: 35692 - RNA, 20 nt, Artificial Sequence
  HTT spacer sequence TTCN PAM
cuucgaaaaccggcacaaga

SEQ ID NO: 35693 - RNA, 20 nt, Artificial Sequence
  HTT spacer sequence TTCN PAM
aguuuuugcccauucaguau

SEQ ID NO: 35694 - RNA, 20 nt, Artificial Sequence
  HTT spacer sequence TTCN PAM
guaugauauuagcugugggu

SEQ ID NO: 35695 - RNA, 20 nt, Artificial Sequence
  HTT spacer sequence TTCN PAM
aucgauaccuaguuuauuga

SEQ ID NO: 35696 - RNA, 20 nt, Artificial Sequence
  HTT spacer sequence TTCN PAM
ugcuaaaaacucucaauaaa

SEQ ID NO: 35697 - RNA, 20 nt, Artificial Sequence
  HTT spacer sequence TTCN PAM
acagccuuucaugcuaaaaa

SEQ ID NO: 35698 - RNA, 20 nt, Artificial Sequence
  HTT spacer sequence TTCN PAM
gcaucuguugagauaaucau

SEQ ID NO: 35699 - RNA, 20 nt, Artificial Sequence
  HTT spacer sequence TTCN PAM
guuuaugugauggauuacgu

SEQ ID NO: 35700 - RNA, 20 nt, Artificial Sequence
  HTT spacer sequence TTCN PAM
acauacgcaaaucaauaaac

SEQ ID NO: 35701 - RNA, 20 nt, Artificial Sequence
  HTT spacer sequence TTCN PAM
agggaugaagcugacuugau

SEQ ID NO: 35702 - RNA, 20 nt, Artificial Sequence
  HTT spacer sequence TTCN PAM
ucccuggaaugcaaggcugg

SEQ ID NO: 35703 - RNA, 20 nt, Artificial Sequence
  HTT spacer sequence TTCN PAM
guuugccaguauuuuauuga

SEQ ID NO: 35704 - RNA, 20 nt, Artificial Sequence
  HTT spacer sequence TTCN PAM
caucgauguucaucagggau

SEQ ID NO: 35705 - RNA, 20 nt, Artificial Sequence
  HTT spacer sequence TTCN PAM
ucagggauauuggccuaaaa

SEQ ID NO: 35706 - RNA, 20 nt, Artificial Sequence
  HTT spacer sequence TTCN PAM
cuuuuuuuguugugucucug

SEQ ID NO: 35707 - RNA, 20 nt, Artificial Sequence
  HTT spacer sequence TTCN PAM
cucuuuuucuauugauugga

SEQ ID NO: 35708 - RNA, 20 nt, Artificial Sequence
  HTT spacer sequence TTCN PAM
auugauuggaauaguuucag

SEQ ID NO: 35709 - RNA, 20 nt, Artificial Sequence
  HTT spacer sequence TTCN PAM
aaucaauagaaaaagagaga

SEQ ID NO: 35710 - RNA, 20 nt, Artificial Sequence
  HTT spacer sequence TTCN PAM
gaaggaaugguaccaucucc

SEQ ID NO: 35711 - RNA, 20 nt, Artificial Sequence
  HTT spacer sequence TTCN PAM
gaaacuauuccaaucaauag

SEQ ID NO: 35712 - RNA, 20 nt, Artificial Sequence
  HTT spacer sequence TTCN PAM
uucugaaacuauuccaauca

SEQ ID NO: 35713 - RNA, 20 nt, Artificial Sequence
  HTT spacer sequence TTCN PAM
accagagguacaaagaggag

SEQ ID NO: 35714 - RNA, 20 nt, Artificial Sequence
  HTT spacer sequence TTCN PAM
gcugugaauccauccuggac

SEQ ID NO: 35715 - RNA, 20 nt, Artificial Sequence
  HTT spacer sequence TTCN PAM
cagccgaauucuaccagagg

SEQ ID NO: 35716 - RNA, 20 nt, Artificial Sequence
  HTT spacer sequence TTCN PAM
aaacuugaggcaauaguuaa

SEQ ID NO: 35717 - RNA, 20 nt, Artificial Sequence
  HTT spacer sequence TTCN PAM
gagauucagcuuuuuucugg

SEQ ID NO: 35718 - RNA, 20 nt, Artificial Sequence
  HTT spacer sequence TTCN PAM
gcuuuuuucugguuuagucu

SEQ ID NO: 35719 - RNA, 20 nt, Artificial Sequence
  HTT spacer sequence TTCN PAM
gguuuagucuugggagggug

SEQ ID NO: 35720 - RNA, 20 nt, Artificial Sequence
  HTT spacer sequence TTCN PAM
uggacacauacacccuccca

SEQ ID NO: 35721 - RNA, 20 nt, Artificial Sequence
  HTT spacer sequence TTCN PAM
ucuagauuuucuaguuuauu

SEQ ID NO: 35722 - RNA, 20 nt, Artificial Sequence
  HTT spacer sequence TTCN PAM
agauuuucuaguuuauuugg

SEQ ID NO: 35723 - RNA, 20 nt, Artificial Sequence
  HTT spacer sequence TTCN PAM
aguuuauuuggguagagaug

SEQ ID NO: 35724 - RNA, 20 nt, Artificial Sequence
  HTT spacer sequence TTCN PAM
cugaugguaguuuguauuuc

SEQ ID NO: 35725 - RNA, 20 nt, Artificial Sequence
  HTT spacer sequence TTCN PAM
gugggaucgguggugauauc

SEQ ID NO: 35726 - RNA, 20 nt, Artificial Sequence
  HTT spacer sequence TTCN PAM
ucucucuuuucuucuuuauu

SEQ ID NO: 35727 - RNA, 20 nt, Artificial Sequence
  HTT spacer sequence TTCN PAM
cucuuuucuucuuuauuagu

SEQ ID NO: 35728 - RNA, 20 nt, Artificial Sequence
  HTT spacer sequence TTCN PAM
ucuuuauuagucuugcuagc

SEQ ID NO: 35729 - RNA, 20 nt, Artificial Sequence
  HTT spacer sequence TTCN PAM
uuauuagucuugcuagcggu

SEQ ID NO: 35730 - RNA, 20 nt, Artificial Sequence
  HTT spacer sequence TTCN PAM
aaaaaccagcaccuggauuc

SEQ ID NO: 35731 - RNA, 20 nt, Artificial Sequence
  HTT spacer sequence TTCN PAM
uugauuuuuuuuggaggguu

SEQ ID NO: 35732 - RNA, 20 nt, Artificial Sequence
  HTT spacer sequence TTCN PAM
ugucucuaucuccuucaguu

SEQ ID NO: 35733 - RNA, 20 nt, Artificial Sequence
  HTT spacer sequence TTCN PAM
guucugcucugaucuuaguu

SEQ ID NO: 35734 - RNA, 20 nt, Artificial Sequence
  HTT spacer sequence TTCN PAM
gcucugaucuuaguuauuuu

SEQ ID NO: 35735 - RNA, 20 nt, Artificial Sequence
  HTT spacer sequence TTCN PAM
gcuagcuuuugaauuuguuu

SEQ ID NO: 35736 - RNA, 20 nt, Artificial Sequence
  HTT spacer sequence TTCN PAM
aaagcuagcagaagacaaaa

SEQ ID NO: 35737 - RNA, 20 nt, Artificial Sequence
  HTT spacer sequence TTCN PAM
aguucuuuuaauugugaugu

SEQ ID NO: 35738 - RNA, 20 nt, Artificial Sequence
  HTT spacer sequence TTCN PAM
uuuaauugugauguuagggu

SEQ ID NO: 35739 - RNA, 20 nt, Artificial Sequence
  HTT spacer sequence TTCN PAM
gcuuucucuugugggcauuu

SEQ ID NO: 35740 - RNA, 20 nt, Artificial Sequence
  HTT spacer sequence TTCN PAM
cuugugggcauuuagugcua

SEQ ID NO: 35741 - RNA, 20 nt, Artificial Sequence
  HTT spacer sequence TTCN PAM
cucuacacacugcuuuaaau

SEQ ID NO: 35742 - RNA, 20 nt, Artificial Sequence
  HTT spacer sequence TTCN PAM
gguauguugugucuucguuc

SEQ ID NO: 35743 - RNA, 20 nt, Artificial Sequence
  HTT spacer sequence TTCN PAM
uucucauugguuuccaagaa

SEQ ID NO: 35744 - RNA, 20 nt, Artificial Sequence
  HTT spacer sequence TTCN PAM
cauugguuuccaagaaaauu

SEQ ID NO: 35745 - RNA, 20 nt, Artificial Sequence
  HTT spacer sequence TTCN PAM
aagaaaauuuuuauuucugc

SEQ ID NO: 35746 - RNA, 20 nt, Artificial Sequence
  HTT spacer sequence TTCN PAM
uggaaaccaaugagaacgaa

SEQ ID NO: 35747 - RNA, 20 nt, Artificial Sequence
  HTT spacer sequence TTCN PAM
gccuucauuucguuauuuac

SEQ ID NO: 35748 - RNA, 20 nt, Artificial Sequence
  HTT spacer sequence TTCN PAM
uuucguuauuuacccaguag

SEQ ID NO: 35749 - RNA, 20 nt, Artificial Sequence
  HTT spacer sequence TTCN PAM
uuauuuacccaguagucauu

SEQ ID NO: 35750 - RNA, 20 nt, Artificial Sequence
  HTT spacer sequence TTCN PAM
agagcagguuguucaguuuc

SEQ ID NO: 35751 - RNA, 20 nt, Artificial Sequence
  HTT spacer sequence TTCN PAM
guuuccauguaguugugugg

SEQ ID NO: 35752 - RNA, 20 nt, Artificial Sequence
  HTT spacer sequence TTCN PAM
auguaguugugugguuuuga

SEQ ID NO: 35753 - RNA, 20 nt, Artificial Sequence
  HTT spacer sequence TTCN PAM
caauccugaguucuaauuug

SEQ ID NO: 35754 - RNA, 20 nt, Artificial Sequence
  HTT spacer sequence TTCN PAM
aauuugauugcacugugguc

SEQ ID NO: 35755 - RNA, 20 nt, Artificial Sequence
  HTT spacer sequence TTCN PAM
guucuuuuacauuugcugag

SEQ ID NO: 35756 - RNA, 20 nt, Artificial Sequence
  HTT spacer sequence TTCN PAM
uuuacauuugcugaggagug

SEQ ID NO: 35757 - RNA, 20 nt, Artificial Sequence
  HTT spacer sequence TTCN PAM
aacuauguggucaguuuuag

SEQ ID NO: 35758 - RNA, 20 nt, Artificial Sequence
  HTT spacer sequence TTCN PAM
aaaacugaccacauaguugg

SEQ ID NO: 35759 - RNA, 20 nt, Artificial Sequence
  HTT spacer sequence TTCN PAM
cagcaccacauugcacuuau

SEQ ID NO: 35760 - RNA, 20 nt, Artificial Sequence
  HTT spacer sequence TTCN PAM
ucucagcaccacauugcacu

SEQ ID NO: 35761 - RNA, 20 nt, Artificial Sequence
  HTT spacer sequence TTCN PAM
guugauuuggggugcagagu

SEQ ID NO: 35762 - RNA, 20 nt, Artificial Sequence
  HTT spacer sequence TTCN PAM
guagaugucuauuagguccg

SEQ ID NO: 35763 - RNA, 20 nt, Artificial Sequence
  HTT spacer sequence TTCN PAM
aguccuggauauccuuguua

SEQ ID NO: 35764 - RNA, 20 nt, Artificial Sequence
  HTT spacer sequence TTCN PAM
ggcucauugaucugccuaau

SEQ ID NO: 35765 - RNA, 20 nt, Artificial Sequence
  HTT spacer sequence TTCN PAM
uagagaccuacaaagagacu

SEQ ID NO: 35766 - RNA, 20 nt, Artificial Sequence
  HTT spacer sequence TTCN PAM
ugaaucugggugcuccugua

SEQ ID NO: 35767 - RNA, 20 nt, Artificial Sequence
  HTT spacer sequence TTCN PAM
ugaagcaaguucuuagagac

SEQ ID NO: 35768 - RNA, 20 nt, Artificial Sequence
  HTT spacer sequence TTCN PAM
uguugaauugaucccuuuac

SEQ ID NO: 35769 - RNA, 20 nt, Artificial Sequence
  HTT spacer sequence TTCN PAM
acaagaagagcuaacuaucc

SEQ ID NO: 35770 - RNA, 20 nt, Artificial Sequence
  HTT spacer sequence TTCN PAM
uugucuccuuugaacuuugu

SEQ ID NO: 35771 - RNA, 20 nt, Artificial Sequence
  HTT spacer sequence TTCN PAM
aaggagacaaagaaggccau

SEQ ID NO: 35772 - RNA, 20 nt, Artificial Sequence
  HTT spacer sequence TTCN PAM
auuugcuuguuagaucuucc

SEQ ID NO: 35773 - RNA, 20 nt, Artificial Sequence
  HTT spacer sequence TTCN PAM
uccaucccuuuauuuugagc

SEQ ID NO: 35774 - RNA, 20 nt, Artificial Sequence
  HTT spacer sequence TTCN PAM
ggagacccaucucacaugca

SEQ ID NO: 35775 - RNA, 20 nt, Artificial Sequence
  HTT spacer sequence TTCN PAM
cacauagcaauauuaaccuu

SEQ ID NO: 35776 - RNA, 20 nt, Artificial Sequence
  HTT spacer sequence TTCN PAM
ucauagcgucaguagucuuu

SEQ ID NO: 35777 - RNA, 20 nt, Artificial Sequence
  HTT spacer sequence TTCN PAM
uagcgucaguagucuuuaca

SEQ ID NO: 35778 - RNA, 20 nt, Artificial Sequence
  HTT spacer sequence TTCN PAM
uuuccauguuuagugcuucc

SEQ ID NO: 35779 - RNA, 20 nt, Artificial Sequence
  HTT spacer sequence TTCN PAM
auguuuagugcuuccuucag

SEQ ID NO: 35780 - RNA, 20 nt, Artificial Sequence
  HTT spacer sequence TTCN PAM
uucaggagcucuuguaaggc

SEQ ID NO: 35781 - RNA, 20 nt, Artificial Sequence
  HTT spacer sequence TTCN PAM
ggagcucuuguaaggcaggc

SEQ ID NO: 35782 - RNA, 20 nt, Artificial Sequence
  HTT spacer sequence TTCN PAM
cguucacuuaugaagcuuag

SEQ ID NO: 35783 - RNA, 20 nt, Artificial Sequence
  HTT spacer sequence TTCN PAM
cuuaugaagcuuaguuuggc

SEQ ID NO: 35784 - RNA, 20 nt, Artificial Sequence
  HTT spacer sequence TTCN PAM
uaagugaacgagaaauaaaa

SEQ ID NO: 35785 - RNA, 20 nt, Artificial Sequence
  HTT spacer sequence TTCN PAM
uauccagccaaacuaagcuu

SEQ ID NO: 35786 - RNA, 20 nt, Artificial Sequence
  HTT spacer sequence TTCN PAM
ggguugaaaauacuuuuuuu

SEQ ID NO: 35787 - RNA, 20 nt, Artificial Sequence
  HTT spacer sequence TTCN PAM
acccagaauuucauauccag

SEQ ID NO: 35788 - RNA, 20 nt, Artificial Sequence
  HTT spacer sequence TTCN PAM
uuaaaaaaaguauuuucaac

SEQ ID NO: 35789 - RNA, 20 nt, Artificial Sequence
  HTT spacer sequence TTCN PAM
acauucuuuaaaaaaaguau

SEQ ID NO: 35790 - RNA, 20 nt, Artificial Sequence
  HTT spacer sequence TTCN PAM
ggcuuguaggauuucugcag

SEQ ID NO: 35791 - RNA, 20 nt, Artificial Sequence
  HTT spacer sequence TTCN PAM
gcagagagaucugcuguuag

SEQ ID NO: 35792 - RNA, 20 nt, Artificial Sequence
  HTT spacer sequence TTCN PAM
cuuuguggguaacccgaccu

SEQ ID NO: 35793 - RNA, 20 nt, Artificial Sequence
  HTT spacer sequence TTCN PAM
cucuggcugcccuuuccuuc

SEQ ID NO: 35794 - RNA, 20 nt, Artificial Sequence
  HTT spacer sequence TTCN PAM
uucauuucaaucuuggugga

SEQ ID NO: 35795 - RNA, 20 nt, Artificial Sequence
  HTT spacer sequence TTCN PAM
uuucaaucuugguggaucug

SEQ ID NO: 35796 - RNA, 20 nt, Artificial Sequence
  HTT spacer sequence TTCN PAM
aucuugguggaucugaugau

SEQ ID NO: 35797 - RNA, 20 nt, Artificial Sequence
  HTT spacer sequence TTCN PAM
cgaggaguaucuuuguggug

SEQ ID NO: 35798 - RNA, 20 nt, Artificial Sequence
  HTT spacer sequence TTCN PAM
cuguauuuccugaauuugaa

SEQ ID NO: 35799 - RNA, 20 nt, Artificial Sequence
  HTT spacer sequence TTCN PAM
ugaauuugaauguuggucug

SEQ ID NO: 35800 - RNA, 20 nt, Artificial Sequence
  HTT spacer sequence TTCN PAM
ggaaauacagagaacaccac

SEQ ID NO: 35801 - RNA, 20 nt, Artificial Sequence
  HTT spacer sequence TTCN PAM
aauucaggaaauacagagaa

SEQ ID NO: 35802 - RNA, 20 nt, Artificial Sequence
  HTT spacer sequence TTCN PAM
ccaaccuagcaaggcagacc

SEQ ID NO: 35803 - RNA, 20 nt, Artificial Sequence
  HTT spacer sequence TTCN PAM
ccuggauaauauccugaaga

SEQ ID NO: 35804 - RNA, 20 nt, Artificial Sequence
  HTT spacer sequence TTCN PAM
ggauauuauccaggagaacu

SEQ ID NO: 35805 - RNA, 20 nt, Artificial Sequence
  HTT spacer sequence TTCN PAM
aacuugguucuauucucccc

SEQ ID NO: 35806 - RNA, 20 nt, Artificial Sequence
  HTT spacer sequence TTCN PAM
auucuccccaucacuuucag

SEQ ID NO: 35807 - RNA, 20 nt, Artificial Sequence
  HTT spacer sequence TTCN PAM
ccccaucacuuucagguaca

SEQ ID NO: 35808 - RNA, 20 nt, Artificial Sequence
  HTT spacer sequence TTCN PAM
gguacaccaaucaaacguag

SEQ ID NO: 35809 - RNA, 20 nt, Artificial Sequence
  HTT spacer sequence TTCN PAM
cauagucccauauuucuugg

SEQ ID NO: 35810 - RNA, 20 nt, Artificial Sequence
  HTT spacer sequence TTCN PAM
uggaggcuugguucauuucu

SEQ ID NO: 35811 - RNA, 20 nt, Artificial Sequence
  HTT spacer sequence TTCN PAM
uuucuuuucacucuuuuuuc

SEQ ID NO: 35812 - RNA, 20 nt, Artificial Sequence
  HTT spacer sequence TTCN PAM
uuucacucuuuuuucucuaa

SEQ ID NO: 35813 - RNA, 20 nt, Artificial Sequence
  HTT spacer sequence TTCN PAM
cucuuuuuucucuaaucuug

SEQ ID NO: 35814 - RNA, 20 nt, Artificial Sequence
  HTT spacer sequence TTCN PAM
cuaaucuugucuucucgcuu

SEQ ID NO: 35815 - RNA, 20 nt, Artificial Sequence
  HTT spacer sequence TTCN PAM
cgcuuuauuucauuaauuug

SEQ ID NO: 35816 - RNA, 20 nt, Artificial Sequence
  HTT spacer sequence TTCN PAM
uuaauuugaucuucaaucac

SEQ ID NO: 35817 - RNA, 20 nt, Artificial Sequence
  HTT spacer sequence TTCN PAM
aucacugauauccuuucuuc

SEQ ID NO: 35818 - RNA, 20 nt, Artificial Sequence
  HTT spacer sequence TTCN PAM
ucugcuugauugaaucggcu

SEQ ID NO: 35819 - RNA, 20 nt, Artificial Sequence
  HTT spacer sequence TTCN PAM
gcuugauugaaucggcuguc

SEQ ID NO: 35820 - RNA, 20 nt, Artificial Sequence
  HTT spacer sequence TTCN PAM
aucaagcagaagaaaggaua

SEQ ID NO: 35821 - RNA, 20 nt, Artificial Sequence
  HTT spacer sequence TTCN PAM
acagccgauucaaucaagca

SEQ ID NO: 35822 - RNA, 20 nt, Artificial Sequence
  HTT spacer sequence TTCN PAM
caaaauucucguucuguggu

SEQ ID NO: 35823 - RNA, 20 nt, Artificial Sequence
  HTT spacer sequence TTCN PAM
cguucugugguuuuuagcuc

SEQ ID NO: 35824 - RNA, 20 nt, Artificial Sequence
  HTT spacer sequence TTCN PAM
gugguuuuuagcuccaucag

SEQ ID NO: 35825 - RNA, 20 nt, Artificial Sequence
  HTT spacer sequence TTCN PAM
cuacacugguuauucuagcc

SEQ ID NO: 35826 - RNA, 20 nt, Artificial Sequence
  HTT spacer sequence TTCN PAM
agccauuagucuaacauuuu

SEQ ID NO: 35827 - RNA, 20 nt, Artificial Sequence
  HTT spacer sequence TTCN PAM
agguuuuuagcuuccuugug

SEQ ID NO: 35828 - RNA, 20 nt, Artificial Sequence
  HTT spacer sequence TTCN PAM
uugugauggguuagaacaug

SEQ ID NO: 35829 - RNA, 20 nt, Artificial Sequence
  HTT spacer sequence TTCN PAM
aacccaucacaaggaagcua

SEQ ID NO: 35830 - RNA, 20 nt, Artificial Sequence
  HTT spacer sequence TTCN PAM
ccgagcuaaaggagcauguu

SEQ ID NO: 35831 - RNA, 20 nt, Artificial Sequence
  HTT spacer sequence TTCN PAM
gaagccuacuucugucaauu

SEQ ID NO: 35832 - RNA, 20 nt, Artificial Sequence
  HTT spacer sequence TTCN PAM
gaaggucgguaauaacaaac

SEQ ID NO: 35833 - RNA, 20 nt, Artificial Sequence
  HTT spacer sequence TTCN PAM
gucaauucaucaaacucauu

SEQ ID NO: 35834 - RNA, 20 nt, Artificial Sequence
  HTT spacer sequence TTCN PAM
ucaaacucauucuccaucca

SEQ ID NO: 35835 - RNA, 20 nt, Artificial Sequence
  HTT spacer sequence TTCN PAM
ccauccaguuuuguucccuu

SEQ ID NO: 35836 - RNA, 20 nt, Artificial Sequence
  HTT spacer sequence TTCN PAM
cuugcuggugaggaguugug

SEQ ID NO: 35837 - RNA, 20 nt, Artificial Sequence
  HTT spacer sequence TTCN PAM
ccuccaaaggaucacaacuc

SEQ ID NO: 35838 - RNA, 20 nt, Artificial Sequence
  HTT spacer sequence TTCN PAM
gguuuuuggaauuuucagcc

SEQ ID NO: 35839 - RNA, 20 nt, Artificial Sequence
  HTT spacer sequence TTCN PAM
aaaaaccagaacaccucuuc

SEQ ID NO: 35840 - RNA, 20 nt, Artificial Sequence
  HTT spacer sequence TTCN PAM
gccuuucugcuaugguuucu

SEQ ID NO: 35841 - RNA, 20 nt, Artificial Sequence
  HTT spacer sequence TTCN PAM
gcuaugguuucuccccauca

SEQ ID NO: 35842 - RNA, 20 nt, Artificial Sequence
  HTT spacer sequence TTCN PAM
ccccaucauugugguuuuau

SEQ ID NO: 35843 - RNA, 20 nt, Artificial Sequence
  HTT spacer sequence TTCN PAM
uuucuguuuguuaguuuucc

SEQ ID NO: 35844 - RNA, 20 nt, Artificial Sequence
  HTT spacer sequence TTCN PAM
guuuguuaguuuuccuucua

SEQ ID NO: 35845 - RNA, 20 nt, Artificial Sequence
  HTT spacer sequence TTCN PAM
uucuaacagacaggccccuc

SEQ ID NO: 35846 - RNA, 20 nt, Artificial Sequence
  HTT spacer sequence TTCN PAM
aacagacaggccccucagcu

SEQ ID NO: 35847 - RNA, 20 nt, Artificial Sequence
  HTT spacer sequence TTCN PAM
gcagccucugcuggugaugc

SEQ ID NO: 35848 - RNA, 20 nt, Artificial Sequence
  HTT spacer sequence TTCN PAM
ucuggaaacaucgucccaga

SEQ ID NO: 35849 - RNA, 20 nt, Artificial Sequence
  HTT spacer sequence TTCN PAM
agaggaaggaucaggcagca

SEQ ID NO: 35850 - RNA, 20 nt, Artificial Sequence
  HTT spacer sequence TTCN PAM
ugcucugggacgauguuucc

SEQ ID NO: 35851 - RNA, 20 nt, Artificial Sequence
  HTT spacer sequence TTCN PAM
uuaucggagcuugaaugccg

SEQ ID NO: 35852 - RNA, 20 nt, Artificial Sequence
  HTT spacer sequence TTCN PAM
agcuccgauaaugaacagac

SEQ ID NO: 35853 - RNA, 20 nt, Artificial Sequence
  HTT spacer sequence TTCN PAM
cccgguacggcauucaagcu

SEQ ID NO: 35854 - RNA, 20 nt, Artificial Sequence
  HTT spacer sequence TTCN PAM
gagcugucaggcacguaugu

SEQ ID NO: 35855 - RNA, 20 nt, Artificial Sequence
  HTT spacer sequence TTCN PAM
ccagauuuaaacauacgugc

SEQ ID NO: 35856 - RNA, 20 nt, Artificial Sequence
  HTT spacer sequence TTCN PAM
gaugugcccuucccccagag

SEQ ID NO: 35857 - RNA, 20 nt, Artificial Sequence
  HTT spacer sequence TTCN PAM
cccagagguggaaucuagag

SEQ ID NO: 35858 - RNA, 20 nt, Artificial Sequence
  HTT spacer sequence TTCN PAM
accucugggggaagggcaca

SEQ ID NO: 35859 - RNA, 20 nt, Artificial Sequence
  HTT spacer sequence TTCN PAM
agcuucccugcugcuuuguu

SEQ ID NO: 35860 - RNA, 20 nt, Artificial Sequence
  HTT spacer sequence TTCN PAM
cugcugcuuuguuuacacug

SEQ ID NO: 35861 - RNA, 20 nt, Artificial Sequence
  HTT spacer sequence TTCN PAM
augcucacaguguaaacaaa

SEQ ID NO: 35862 - RNA, 20 nt, Artificial Sequence
  HTT spacer sequence TTCN PAM
gagugcugcgcuagcaguga

SEQ ID NO: 35863 - RNA, 20 nt, Artificial Sequence
  HTT spacer sequence TTCN PAM
cuccugugccuggcucagcg

SEQ ID NO: 35864 - RNA, 20 nt, Artificial Sequence
  HTT spacer sequence TTCN PAM
caaccagcagaccaggagau

SEQ ID NO: 35865 - RNA, 20 nt, Artificial Sequence
  HTT spacer sequence TTCN PAM
cacagucuucacaaccagca

SEQ ID NO: 35866 - RNA, 20 nt, Artificial Sequence
  HTT spacer sequence TTCN PAM
gguacagucacucauggcuu

SEQ ID NO: 35867 - RNA, 20 nt, Artificial Sequence
  HTT spacer sequence TTCN PAM
uuuggcuuggaaagggaagu

SEQ ID NO: 35868 - RNA, 20 nt, Artificial Sequence
  HTT spacer sequence TTCN PAM
aagccaaaggaagccaugag

SEQ ID NO: 35869 - RNA, 20 nt, Artificial Sequence
  HTT spacer sequence TTCN PAM
cuuuccaagccaaaggaagc

SEQ ID NO: 35870 - RNA, 20 nt, Artificial Sequence
  HTT spacer sequence TTCN PAM
caggugaggcaacaccccgc

SEQ ID NO: 35871 - RNA, 20 nt, Artificial Sequence
  HTT spacer sequence TTCN PAM
gcuugcccuccgugggcugc

SEQ ID NO: 35872 - RNA, 20 nt, Artificial Sequence
  HTT spacer sequence TTCN PAM
ucucacugggacuugcugga

SEQ ID NO: 35873 - RNA, 20 nt, Artificial Sequence
  HTT spacer sequence TTCN PAM
aacugagguaccuaguucau

SEQ ID NO: 35874 - RNA, 20 nt, Artificial Sequence
  HTT spacer sequence TTCN PAM
gcauuuccaacugagguacc

SEQ ID NO: 35875 - RNA, 20 nt, Artificial Sequence
  HTT spacer sequence TTCN PAM
gugucgaucucacugggagc

SEQ ID NO: 35876 - RNA, 20 nt, Artificial Sequence
  HTT spacer sequence TTCN PAM
uauucggccauuuuggaagc

SEQ ID NO: 35877 - RNA, 20 nt, Artificial Sequence
  HTT spacer sequence TTCN PAM
gccauuuuggaagcaucccu

SEQ ID NO: 35878 - RNA, 20 nt, Artificial Sequence
  HTT spacer sequence TTCN PAM
aaaauggccgaauaggaaca

SEQ ID NO: 35879 - RNA, 20 nt, Artificial Sequence
  HTT spacer sequence TTCN PAM
agcgauucuccuaccucagc

SEQ ID NO: 35880 - RNA, 20 nt, Artificial Sequence
  HTT spacer sequence TTCN PAM
ccuaccucagccuccggagu

SEQ ID NO: 35881 - RNA, 20 nt, Artificial Sequence
  HTT spacer sequence TTCN PAM
ccacauuggccaggcuaguc

SEQ ID NO: 35882 - RNA, 20 nt, Artificial Sequence
  HTT spacer sequence TTCN PAM
agacuagccuggccaaugug

SEQ ID NO: 35883 - RNA, 20 nt, Artificial Sequence
  HTT spacer sequence TTCN PAM
gaucucccucucuuugcccu

SEQ ID NO: 35884 - RNA, 20 nt, Artificial Sequence
  HTT spacer sequence TTCN PAM
auuuugcuaaaauguguuau

SEQ ID NO: 35885 - RNA, 20 nt, Artificial Sequence
  HTT spacer sequence TTCN PAM
aauuuaaaacauauaguauu

SEQ ID NO: 35886 - RNA, 20 nt, Artificial Sequence
  HTT spacer sequence TTCN PAM
guauaaucucacguucaaau

SEQ ID NO: 35887 - RNA, 20 nt, Artificial Sequence
  HTT spacer sequence TTCN PAM
uuaaauaguaagauuuucuu

SEQ ID NO: 35888 - RNA, 20 nt, Artificial Sequence
  HTT spacer sequence TTCN PAM
uuuuuguauguggguuuuuu

SEQ ID NO: 35889 - RNA, 20 nt, Artificial Sequence
  HTT spacer sequence TTCN PAM
auauaugacagucauaauaa

SEQ ID NO: 35890 - RNA, 20 nt, Artificial Sequence
  HTT spacer sequence TTCN PAM
guuacagucagugaauguau

SEQ ID NO: 35891 - RNA, 20 nt, Artificial Sequence
  HTT spacer sequence TTCN PAM
cugacuguaacugaaaaaca

SEQ ID NO: 35892 - RNA, 20 nt, Artificial Sequence
  HTT spacer sequence TTCN PAM
uuaaauugugacuuauuaau

SEQ ID NO: 35893 - RNA, 20 nt, Artificial Sequence
  HTT spacer sequence TTCN PAM
ugaaaucagccauaugguug

SEQ ID NO: 35894 - RNA, 20 nt, Artificial Sequence
  HTT spacer sequence TTCN PAM
agaauauaaagaucaacuaa

SEQ ID NO: 35895 - RNA, 20 nt, Artificial Sequence
  HTT spacer sequence TTCN PAM
gagaugagcuuauuaucuuu

SEQ ID NO: 35896 - RNA, 20 nt, Artificial Sequence
  HTT spacer sequence TTCN PAM
uaugccaaauguaaaaauuu

SEQ ID NO: 35897 - RNA, 20 nt, Artificial Sequence
  HTT spacer sequence TTCN PAM
cuggccugugucuuuacagu

SEQ ID NO: 35898 - RNA, 20 nt, Artificial Sequence
  HTT spacer sequence TTCN PAM
aaguucaucuuuuuugcugu

SEQ ID NO: 35899 - RNA, 20 nt, Artificial Sequence
  HTT spacer sequence TTCN PAM
ucuuuuuugcuguuucaaga

SEQ ID NO: 35900 - RNA, 20 nt, Artificial Sequence
  HTT spacer sequence TTCN PAM
agacagaggcccauuuuagc

SEQ ID NO: 35901 - RNA, 20 nt, Artificial Sequence
  HTT spacer sequence TTCN PAM
cgcauauccuuuuguuugua

SEQ ID NO: 35902 - RNA, 20 nt, Artificial Sequence
  HTT spacer sequence TTCN PAM
aaaguacaaacaaaaggaua

SEQ ID NO: 35903 - RNA, 20 nt, Artificial Sequence
  HTT spacer sequence TTCN PAM
acccuacauaucccccucua

SEQ ID NO: 35904 - RNA, 20 nt, Artificial Sequence
  HTT spacer sequence TTCN PAM
cagguucuuguuugcacuug

SEQ ID NO: 35905 - RNA, 20 nt, Artificial Sequence
  HTT spacer sequence TTCN PAM
uguuugcacuuggccccuga

SEQ ID NO: 35906 - RNA, 20 nt, Artificial Sequence
  HTT spacer sequence TTCN PAM
ucaaaacagucaggggccaa

SEQ ID NO: 35907 - RNA, 20 nt, Artificial Sequence
  HTT spacer sequence TTCN PAM
gaucucuuucugccacacag

SEQ ID NO: 35908 - RNA, 20 nt, Artificial Sequence
  HTT spacer sequence TTCN PAM
gccacacagcaguucugagg

SEQ ID NO: 35909 - RNA, 20 nt, Artificial Sequence
  HTT spacer sequence TTCN PAM
gaggcagcuggaaagauauc

SEQ ID NO: 35910 - RNA, 20 nt, Artificial Sequence
  HTT spacer sequence TTCN PAM
agcugccucagaacugcugu

SEQ ID NO: 35911 - RNA, 20 nt, Artificial Sequence
  HTT spacer sequence TTCN PAM
ccuaagcaaggucacagaua

SEQ ID NO: 35912 - RNA, 20 nt, Artificial Sequence
  HTT spacer sequence TTCN PAM
ucagacuucugugaguuuac

SEQ ID NO: 35913 - RNA, 20 nt, Artificial Sequence
  HTT spacer sequence TTCN PAM
gacuucugugaguuuaccua

SEQ ID NO: 35914 - RNA, 20 nt, Artificial Sequence
  HTT spacer sequence TTCN PAM
gugaguuuaccuaguuccag

SEQ ID NO: 35915 - RNA, 20 nt, Artificial Sequence
  HTT spacer sequence TTCN PAM
aggauuuaaaggcacagaga

SEQ ID NO: 35916 - RNA, 20 nt, Artificial Sequence
  HTT spacer sequence TTCN PAM
aaagucucugugccuuuaaa

SEQ ID NO: 35917 - RNA, 20 nt, Artificial Sequence
  HTT spacer sequence TTCN PAM
auuuuaauucuaaagucucu

SEQ ID NO: 35918 - RNA, 20 nt, Artificial Sequence
  HTT spacer sequence TTCN PAM
uuuucuaaauagcaacacua

SEQ ID NO: 35919 - RNA, 20 nt, Artificial Sequence
  HTT spacer sequence TTCN PAM
aaauagcaacacuaggaaua

SEQ ID NO: 35920 - RNA, 20 nt, Artificial Sequence
  HTT spacer sequence TTCN PAM
uaguguugcuauuuagaaaa

SEQ ID NO: 35921 - RNA, 20 nt, Artificial Sequence
  HTT spacer sequence TTCN PAM
acauucuugacagguaaugu

SEQ ID NO: 35922 - RNA, 20 nt, Artificial Sequence
  HTT spacer sequence TTCN PAM
ugacagguaauguuuuuucu

SEQ ID NO: 35923 - RNA, 20 nt, Artificial Sequence
  HTT spacer sequence TTCN PAM
ugucuucuaauccuuauuua

SEQ ID NO: 35924 - RNA, 20 nt, Artificial Sequence
  HTT spacer sequence TTCN PAM
aauccuuauuuauuccauac

SEQ ID NO: 35925 - RNA, 20 nt, Artificial Sequence
  HTT spacer sequence TTCN PAM
auacucauuuuuauacauaa

SEQ ID NO: 35926 - RNA, 20 nt, Artificial Sequence
  HTT spacer sequence TTCN PAM
auuauguauaaaaaugagua

SEQ ID NO: 35927 - RNA, 20 nt, Artificial Sequence
  HTT spacer sequence TTCN PAM
uuugcauuauauuauagacg

SEQ ID NO: 35928 - RNA, 20 nt, Artificial Sequence
  HTT spacer sequence TTCN PAM
uguaacuccuuacuguucca

SEQ ID NO: 35929 - RNA, 20 nt, Artificial Sequence
  HTT spacer sequence TTCN PAM
auuuuauauguuuugucugg

SEQ ID NO: 35930 - RNA, 20 nt, Artificial Sequence
  HTT spacer sequence TTCN PAM
cgguuugcagauaaagucuu

SEQ ID NO: 35931 - RNA, 20 nt, Artificial Sequence
  HTT spacer sequence TTCN PAM
uuuuguagagacaguuuccc

SEQ ID NO: 35932 - RNA, 20 nt, Artificial Sequence
  HTT spacer sequence TTCN PAM
ugugccuggguuuauugagg

SEQ ID NO: 35933 - RNA, 20 nt, Artificial Sequence
  HTT spacer sequence TTCN PAM
uaguauuuuuaaaguuugga

SEQ ID NO: 35934 - RNA, 20 nt, Artificial Sequence
  HTT spacer sequence TTCN PAM
aaacuuuaaaaauacuauga

SEQ ID NO: 35935 - RNA, 20 nt, Artificial Sequence
  HTT spacer sequence TTCN PAM
uucuuucuuucuuucuuuuu

SEQ ID NO: 35936 - RNA, 20 nt, Artificial Sequence
  HTT spacer sequence TTCN PAM
uucuuucuuucuuuuuuuuu

SEQ ID NO: 35937 - RNA, 20 nt, Artificial Sequence
  HTT spacer sequence TTCN PAM
uucuuucuuuuuuuuuuuuu

SEQ ID NO: 35938 - RNA, 20 nt, Artificial Sequence
  HTT spacer sequence TTCN PAM
uucuuuuuuuuuuuuuugag

SEQ ID NO: 35939 - RNA, 20 nt, Artificial Sequence
  HTT spacer sequence TTCN PAM
uuuuuuuuuuuuugagacag

SEQ ID NO: 35940 - RNA, 20 nt, Artificial Sequence
  HTT spacer sequence TTCN PAM
cgccauucuccugccucagc

SEQ ID NO: 35941 - RNA, 20 nt, Artificial Sequence
  HTT spacer sequence TTCN PAM
ccugccucagccuccugagu

SEQ ID NO: 35942 - RNA, 20 nt, Artificial Sequence
  HTT spacer sequence TTCN PAM
cuguguuagccaggaugguc

SEQ ID NO: 35943 - RNA, 20 nt, Artificial Sequence
  HTT spacer sequence TTCN PAM
ucaaagauuuuuuuucugcc

SEQ ID NO: 35944 - RNA, 20 nt, Artificial Sequence
  HTT spacer sequence TTCN PAM
aagauuuuuuuucugcccug

SEQ ID NO: 35945 - RNA, 20 nt, Artificial Sequence
  HTT spacer sequence TTCN PAM
gcccugccucccuccuuuuu

SEQ ID NO: 35946 - RNA, 20 nt, Artificial Sequence
  HTT spacer sequence TTCN PAM
cucucuuaaaggggcuguga

SEQ ID NO: 35947 - RNA, 20 nt, Artificial Sequence
  HTT spacer sequence TTCN PAM
ugaaugauugcuuaguguug

SEQ ID NO: 35948 - RNA, 20 nt, Artificial Sequence
  HTT spacer sequence TTCN PAM
ggaaaucacagccccuuuaa

SEQ ID NO: 35949 - RNA, 20 nt, Artificial Sequence
  HTT spacer sequence TTCN PAM
guguuugauuguuuuaugug

SEQ ID NO: 35950 - RNA, 20 nt, Artificial Sequence
  HTT spacer sequence TTCN PAM
guuuuguauaguuucuauua

SEQ ID NO: 35951 - RNA, 20 nt, Artificial Sequence
  HTT spacer sequence TTCN PAM
auuauuguguuuucaaguuc

SEQ ID NO: 35952 - RNA, 20 nt, Artificial Sequence
  HTT spacer sequence TTCN PAM
aguucucugaucuuuucuuc

SEQ ID NO: 35953 - RNA, 20 nt, Artificial Sequence
  HTT spacer sequence TTCN PAM
cugaucuuuucuucuacagu

SEQ ID NO: 35954 - RNA, 20 nt, Artificial Sequence
  HTT spacer sequence TTCN PAM
ucuacagugucuacucuguu

SEQ ID NO: 35955 - RNA, 20 nt, Artificial Sequence
  HTT spacer sequence TTCN PAM
acagugucuacucuguuguu

SEQ ID NO: 35956 - RNA, 20 nt, Artificial Sequence
  HTT spacer sequence TTCN PAM
aaaacaaaaaaaaaaauacg

SEQ ID NO: 35957 - RNA, 20 nt, Artificial Sequence
  HTT spacer sequence TTCN PAM
ucugccucagccucccgagu

SEQ ID NO: 35958 - RNA, 20 nt, Artificial Sequence
  HTT spacer sequence TTCN PAM
gccucagccucccgaguagc

SEQ ID NO: 35959 - RNA, 20 nt, Artificial Sequence
  HTT spacer sequence TTCN PAM
ccauguuggccaaacuggcc

SEQ ID NO: 35960 - RNA, 20 nt, Artificial Sequence
  HTT spacer sequence TTCN PAM
aggccaguuuggccaacaug

SEQ ID NO: 35961 - RNA, 20 nt, Artificial Sequence
  HTT spacer sequence TTCN PAM
uccgccucggucucccaaag

SEQ ID NO: 35962 - RNA, 20 nt, Artificial Sequence
  HTT spacer sequence TTCN PAM
guguauaucacuaauuuugu

SEQ ID NO: 35963 - RNA, 20 nt, Artificial Sequence
  HTT spacer sequence TTCN PAM
agagauaaaaacaaaauuag

SEQ ID NO: 35964 - RNA, 20 nt, Artificial Sequence
  HTT spacer sequence TTCN PAM
guuuagcuuugugaacacaa

SEQ ID NO: 35965 - RNA, 20 nt, Artificial Sequence
  HTT spacer sequence TTCN PAM
caaagcuaaacagaaacaca

SEQ ID NO: 35966 - RNA, 20 nt, Artificial Sequence
  HTT spacer sequence TTCN PAM
cugcuaguucuaagaucuuc

SEQ ID NO: 35967 - RNA, 20 nt, Artificial Sequence
  HTT spacer sequence TTCN PAM
aagaucuucuaauaacuucc

SEQ ID NO: 35968 - RNA, 20 nt, Artificial Sequence
  HTT spacer sequence TTCN PAM
aauaacuucccaguucuugg

SEQ ID NO: 35969 - RNA, 20 nt, Artificial Sequence
  HTT spacer sequence TTCN PAM
caguucuugguguuucucau

SEQ ID NO: 35970 - RNA, 20 nt, Artificial Sequence
  HTT spacer sequence TTCN PAM
ugguguuucucauugguuga

SEQ ID NO: 35971 - RNA, 20 nt, Artificial Sequence
  HTT spacer sequence TTCN PAM
cauugguugauugauacucc

SEQ ID NO: 35972 - RNA, 20 nt, Artificial Sequence
  HTT spacer sequence TTCN PAM
ugccucuuuguauggcugcc

SEQ ID NO: 35973 - RNA, 20 nt, Artificial Sequence
  HTT spacer sequence TTCN PAM
caagguugggcauccaauaa

SEQ ID NO: 35974 - RNA, 20 nt, Artificial Sequence
  HTT spacer sequence TTCN PAM
cauagaucuucuugagcuuu

SEQ ID NO: 35975 - RNA, 20 nt, Artificial Sequence
  HTT spacer sequence TTCN PAM
ugagcuuuguucugagguua

SEQ ID NO: 35976 - RNA, 20 nt, Artificial Sequence
  HTT spacer sequence TTCN PAM
gagguuaguugaguuacaua

SEQ ID NO: 35977 - RNA, 20 nt, Artificial Sequence
  HTT spacer sequence TTCN PAM
ucuuuaggaauaauuaggua

SEQ ID NO: 35978 - RNA, 20 nt, Artificial Sequence
  HTT spacer sequence TTCN PAM
uaaagaggaauaauuagucc

SEQ ID NO: 35979 - RNA, 20 nt, Artificial Sequence
  HTT spacer sequence TTCN PAM
uuagguagaguacucaggau

SEQ ID NO: 35980 - RNA, 20 nt, Artificial Sequence
  HTT spacer sequence TTCN PAM
gguucauuagguagaguacu

SEQ ID NO: 35981 - RNA, 20 nt, Artificial Sequence
  HTT spacer sequence TTCN PAM
aguccgccugcugagaacag

SEQ ID NO: 35982 - RNA, 20 nt, Artificial Sequence
  HTT spacer sequence TTCN PAM
cagcaggcggacuggaaaac

SEQ ID NO: 35983 - RNA, 20 nt, Artificial Sequence
  HTT spacer sequence TTCN PAM
agcccugugugagcgcugag

SEQ ID NO: 35984 - RNA, 20 nt, Artificial Sequence
  HTT spacer sequence TTCN PAM
aauccuuuccaaugcuucuu

SEQ ID NO: 35985 - RNA, 20 nt, Artificial Sequence
  HTT spacer sequence TTCN PAM
aaugcuucuuucccuggccu

SEQ ID NO: 35986 - RNA, 20 nt, Artificial Sequence
  HTT spacer sequence TTCN PAM
uucccuggccucagggaguu

SEQ ID NO: 35987 - RNA, 20 nt, Artificial Sequence
  HTT spacer sequence TTCN PAM
cuggccucagggaguuuucu

SEQ ID NO: 35988 - RNA, 20 nt, Artificial Sequence
  HTT spacer sequence TTCN PAM
cacacacauaucucugcuga

SEQ ID NO: 35989 - RNA, 20 nt, Artificial Sequence
  HTT spacer sequence TTCN PAM
ccagaucuccagagcucucu

SEQ ID NO: 35990 - RNA, 20 nt, Artificial Sequence
  HTT spacer sequence TTCN PAM
cuucucuggugcucugucuu

SEQ ID NO: 35991 - RNA, 20 nt, Artificial Sequence
  HTT spacer sequence TTCN PAM
cuggugcucugucuuaugaa

SEQ ID NO: 35992 - RNA, 20 nt, Artificial Sequence
  HTT spacer sequence TTCN PAM
uaagacagagcaccagagaa

SEQ ID NO: 35993 - RNA, 20 nt, Artificial Sequence
  HTT spacer sequence TTCN PAM
cagcaccucuucaauucaga

SEQ ID NO: 35994 - RNA, 20 nt, Artificial Sequence
  HTT spacer sequence TTCN PAM
auucagaggguugccugucc

SEQ ID NO: 35995 - RNA, 20 nt, Artificial Sequence
  HTT spacer sequence TTCN PAM
gaggguugccugucccuccu

SEQ ID NO: 35996 - RNA, 20 nt, Artificial Sequence
  HTT spacer sequence TTCN PAM
uaggcuguggcacaaggagg

SEQ ID NO: 35997 - RNA, 20 nt, Artificial Sequence
  HTT spacer sequence TTCN PAM
uugcucauguccagugucuu

SEQ ID NO: 35998 - RNA, 20 nt, Artificial Sequence
  HTT spacer sequence TTCN PAM
acuacugagcacaaugaggg

SEQ ID NO: 35999 - RNA, 20 nt, Artificial Sequence
  HTT spacer sequence TTCN PAM
cugguacuuggggagcucuu

SEQ ID NO: 36000 - RNA, 20 nt, Artificial Sequence
  HTT spacer sequence TTCN PAM
agagcuccccaaguaccagg

SEQ ID NO: 36001 - RNA, 20 nt, Artificial Sequence
  HTT spacer sequence TTCN PAM
ggccuuucaagagcucccca

SEQ ID NO: 36002 - RNA, 20 nt, Artificial Sequence
  HTT spacer sequence TTCN PAM
caccuuuuccagggcuucag

SEQ ID NO: 36003 - RNA, 20 nt, Artificial Sequence
  HTT spacer sequence TTCN PAM
agggcuucaguuucuggugc

SEQ ID NO: 36004 - RNA, 20 nt, Artificial Sequence
  HTT spacer sequence TTCN PAM
guuucuggugcacaucaagc

SEQ ID NO: 36005 - RNA, 20 nt, Artificial Sequence
  HTT spacer sequence TTCN PAM
ggugcacaucaagcauucca

SEQ ID NO: 36006 - RNA, 20 nt, Artificial Sequence
  HTT spacer sequence TTCN PAM
auacacauuuguuaaagucc

SEQ ID NO: 36007 - RNA, 20 nt, Artificial Sequence
  HTT spacer sequence TTCN PAM
cagguucuauuuguaauuuu

SEQ ID NO: 36008 - RNA, 20 nt, Artificial Sequence
  HTT spacer sequence TTCN PAM
auuuguaauuuuuucaguua

SEQ ID NO: 36009 - RNA, 20 nt, Artificial Sequence
  HTT spacer sequence TTCN PAM
guuaacauguauuggguauc

SEQ ID NO: 36010 - RNA, 20 nt, Artificial Sequence
  HTT spacer sequence TTCN PAM
auucugacaagaacaaccuu

SEQ ID NO: 36011 - RNA, 20 nt, Artificial Sequence
  HTT spacer sequence TTCN PAM
gacaagaacaaccuuaaaca

SEQ ID NO: 36012 - RNA, 20 nt, Artificial Sequence
  HTT spacer sequence TTCN PAM
ugucagaauugaauuuguca

SEQ ID NO: 36013 - RNA, 20 nt, Artificial Sequence
  HTT spacer sequence TTCN PAM
aaguguuuaagguuguucuu

SEQ ID NO: 36014 - RNA, 20 nt, Artificial Sequence
  HTT spacer sequence TTCN PAM
gauaugcucaaaguauauuc

SEQ ID NO: 36015 - RNA, 20 nt, Artificial Sequence
  HTT spacer sequence TTCN PAM
aauacucaagggccacacau

SEQ ID NO: 36016 - RNA, 20 nt, Artificial Sequence
  HTT spacer sequence TTCN PAM
uguugguuucaaauacucaa

SEQ ID NO: 36017 - RNA, 20 nt, Artificial Sequence
  HTT spacer sequence TTCN PAM
gucuaauugguguuggcuuu

SEQ ID NO: 36018 - RNA, 20 nt, Artificial Sequence
  HTT spacer sequence TTCN PAM
aucagcugcuaaaagccaac

SEQ ID NO: 36019 - RNA, 20 nt, Artificial Sequence
  HTT spacer sequence TTCN PAM
ugauuagccaggcaguggug

SEQ ID NO: 36020 - RNA, 20 nt, Artificial Sequence
  HTT spacer sequence TTCN PAM
ccacugccuggcuaaucacg

SEQ ID NO: 36021 - RNA, 20 nt, Artificial Sequence
  HTT spacer sequence TTCN PAM
gaaugccuagguaucuaggc

SEQ ID NO: 36022 - RNA, 20 nt, Artificial Sequence
  HTT spacer sequence TTCN PAM
gaaugcacagccuguuucac

SEQ ID NO: 36023 - RNA, 20 nt, Artificial Sequence
  HTT spacer sequence TTCN PAM
gaaugguggcgcucuuugag

SEQ ID NO: 36024 - RNA, 20 nt, Artificial Sequence
  HTT spacer sequence TTCN PAM
gaaugccuagauaccuaggc

SEQ ID NO: 36025 - RNA, 20 nt, Artificial Sequence
  HTT spacer sequence TTCN PAM
ucuuucuugauucuuuuuuu

SEQ ID NO: 36026 - RNA, 20 nt, Artificial Sequence
  HTT spacer sequence TTCN PAM
uucuugauucuuuuuuuuuu

SEQ ID NO: 36027 - RNA, 20 nt, Artificial Sequence
  HTT spacer sequence TTCN PAM
ugauucuuuuuuuuuuuuuu

SEQ ID NO: 36028 - RNA, 20 nt, Artificial Sequence
  HTT spacer sequence TTCN PAM
uuuuuuuuuuuuuuugagau

SEQ ID NO: 36029 - RNA, 20 nt, Artificial Sequence
  HTT spacer sequence TTCN PAM
cucuuguugcccagguaaca

SEQ ID NO: 36030 - RNA, 20 nt, Artificial Sequence
  HTT spacer sequence TTCN PAM
agcgauucuccugccucagc

SEQ ID NO: 36031 - RNA, 20 nt, Artificial Sequence
  HTT spacer sequence TTCN PAM
ccugccucagccucucaagu

SEQ ID NO: 36032 - RNA, 20 nt, Artificial Sequence
  HTT spacer sequence TTCN PAM
cuauauuggucaggcugguc

SEQ ID NO: 36033 - RNA, 20 nt, Artificial Sequence
  HTT spacer sequence TTCN PAM
agaccagccugaccaauaua

SEQ ID NO: 36034 - RNA, 20 nt, Artificial Sequence
  HTT spacer sequence TTCN PAM
ugauucuugaaaaggacauu

SEQ ID NO: 36035 - RNA, 20 nt, Artificial Sequence
  HTT spacer sequence TTCN PAM
ugaaaaggacauugggugcu

SEQ ID NO: 36036 - RNA, 20 nt, Artificial Sequence
  HTT spacer sequence TTCN PAM
agaaucaagaaggggcuggg

SEQ ID NO: 36037 - RNA, 20 nt, Artificial Sequence
  HTT spacer sequence TTCN PAM
cacaagcauuuuuaucaaca

SEQ ID NO: 36038 - RNA, 20 nt, Artificial Sequence
  HTT spacer sequence TTCN PAM
aggacugauuugugguaaau

SEQ ID NO: 36039 - RNA, 20 nt, Artificial Sequence
  HTT spacer sequence TTCN PAM
cugaacauauucaggggcuc

SEQ ID NO: 36040 - RNA, 20 nt, Artificial Sequence
  HTT spacer sequence TTCN PAM
gugaacacaacuaugauaca

SEQ ID NO: 36041 - RNA, 20 nt, Artificial Sequence
  HTT spacer sequence TTCN PAM
ggggcucuacagaugcaggg

SEQ ID NO: 36042 - RNA, 20 nt, Artificial Sequence
  HTT spacer sequence TTCN PAM
gaauuccugcccugcgaaca

SEQ ID NO: 36043 - RNA, 20 nt, Artificial Sequence
  HTT spacer sequence TTCN PAM
gaagugugcaaagcagcuaa

SEQ ID NO: 36044 - RNA, 20 nt, Artificial Sequence
  HTT spacer sequence TTCN PAM
ugcccugcgaacaggacugg

SEQ ID NO: 36045 - RNA, 20 nt, Artificial Sequence
  HTT spacer sequence TTCN PAM
cagggcaggaauucagaagu

SEQ ID NO: 36046 - RNA, 20 nt, Artificial Sequence
  HTT spacer sequence TTCN PAM
auaaacuguuaucaaguacc

SEQ ID NO: 36047 - RNA, 20 nt, Artificial Sequence
  HTT spacer sequence TTCN PAM
cucauuaauucaauaaacug

SEQ ID NO: 36048 - RNA, 20 nt, Artificial Sequence
  HTT spacer sequence TTCN PAM
uucacucauuaauucaauaa

SEQ ID NO: 36049 - RNA, 20 nt, Artificial Sequence
  HTT spacer sequence TTCN PAM
ugcauuuauguaucuguuca

SEQ ID NO: 36050 - RNA, 20 nt, Artificial Sequence
  HTT spacer sequence TTCN PAM
uucaugcauuuauguaucug

SEQ ID NO: 36051 - RNA, 20 nt, Artificial Sequence
  HTT spacer sequence TTCN PAM
agacuuuuuacugacuguuc

SEQ ID NO: 36052 - RNA, 20 nt, Artificial Sequence
  HTT spacer sequence TTCN PAM
aaauaagaaauugaaaacuu

SEQ ID NO: 36053 - RNA, 20 nt, Artificial Sequence
  HTT spacer sequence TTCN PAM
uauuuugaacagucaguaaa

SEQ ID NO: 36054 - RNA, 20 nt, Artificial Sequence
  HTT spacer sequence TTCN PAM
auuucuuauuuugaacaguc

SEQ ID NO: 36055 - RNA, 20 nt, Artificial Sequence
  HTT spacer sequence TTCN PAM
ucugauuuuccucuacuauu

SEQ ID NO: 36056 - RNA, 20 nt, Artificial Sequence
  HTT spacer sequence TTCN PAM
ucuacuauuuacacaauuua

SEQ ID NO: 36057 - RNA, 20 nt, Artificial Sequence
  HTT spacer sequence TTCN PAM
auuuaaauuguguaaauagu

SEQ ID NO: 36058 - RNA, 20 nt, Artificial Sequence
  HTT spacer sequence TTCN PAM
auuucugucuaggauucgua

SEQ ID NO: 36059 - RNA, 20 nt, Artificial Sequence
  HTT spacer sequence TTCN PAM
gucuaggauucguacaauaa

SEQ ID NO: 36060 - RNA, 20 nt, Artificial Sequence
  HTT spacer sequence TTCN PAM
uacaauaacgggucaucucu

SEQ ID NO: 36061 - RNA, 20 nt, Artificial Sequence
  HTT spacer sequence TTCN PAM
acaguguguugaagagaucc

SEQ ID NO: 36062 - RNA, 20 nt, Artificial Sequence
  HTT spacer sequence TTCN PAM
acacacuguagaaagacaag

SEQ ID NO: 36063 - RNA, 20 nt, Artificial Sequence
  HTT spacer sequence TTCN PAM
gguauccuaggaucucuuca

SEQ ID NO: 36064 - RNA, 20 nt, Artificial Sequence
  HTT spacer sequence TTCN PAM
cgacuaaagcaggauuucag

SEQ ID NO: 36065 - RNA, 20 nt, Artificial Sequence
  HTT spacer sequence TTCN PAM
acaaguaagagcuucauucu

SEQ ID NO: 36066 - RNA, 20 nt, Artificial Sequence
  HTT spacer sequence TTCN PAM
uucuuuuccucuucuguuaa

SEQ ID NO: 36067 - RNA, 20 nt, Artificial Sequence
  HTT spacer sequence TTCN PAM
uuuccucuucuguuaagacg

SEQ ID NO: 36068 - RNA, 20 nt, Artificial Sequence
  HTT spacer sequence TTCN PAM
ucuucuguuaagacguucgg

SEQ ID NO: 36069 - RNA, 20 nt, Artificial Sequence
  HTT spacer sequence TTCN PAM
guuaagacguucggguauga

SEQ ID NO: 36070 - RNA, 20 nt, Artificial Sequence
  HTT spacer sequence TTCN PAM
gguaugacagcaaaacgcug

SEQ ID NO: 36071 - RNA, 20 nt, Artificial Sequence
  HTT spacer sequence TTCN PAM
cuucacuccccaggaggacg

SEQ ID NO: 36072 - RNA, 20 nt, Artificial Sequence
  HTT spacer sequence TTCN PAM
cuccccaggaggacgagguc

SEQ ID NO: 36073 - RNA, 20 nt, Artificial Sequence
  HTT spacer sequence TTCN PAM
gguguccucugcccuccaca

SEQ ID NO: 36074 - RNA, 20 nt, Artificial Sequence
  HTT spacer sequence TTCN PAM
agucccucggaguuucuguu

SEQ ID NO: 36075 - RNA, 20 nt, Artificial Sequence
  HTT spacer sequence TTCN PAM
guuuagaaugcucaaucuca

SEQ ID NO: 36076 - RNA, 20 nt, Artificial Sequence
  HTT spacer sequence TTCN PAM
aaacagaaacuccgagggac

SEQ ID NO: 36077 - RNA, 20 nt, Artificial Sequence
  HTT spacer sequence TTCN PAM
aaaugagauugagcauucua

SEQ ID NO: 36078 - RNA, 20 nt, Artificial Sequence
  HTT spacer sequence TTCN PAM
uugcaauucuaaaugagauu

SEQ ID NO: 36079 - RNA, 20 nt, Artificial Sequence
  HTT spacer sequence TTCN PAM
uacaauaucucaugagguau

SEQ ID NO: 36080 - RNA, 20 nt, Artificial Sequence
  HTT spacer sequence TTCN PAM
caggaagaauuucacgcugu

SEQ ID NO: 36081 - RNA, 20 nt, Artificial Sequence
  HTT spacer sequence TTCN PAM
ugugaaucacuauuaauacc

SEQ ID NO: 36082 - RNA, 20 nt, Artificial Sequence
  HTT spacer sequence TTCN PAM
uccugugaaucacuauuaau

SEQ ID NO: 36083 - RNA, 20 nt, Artificial Sequence
  HTT spacer sequence TTCN PAM
cgcugugagucuuugcuaac

SEQ ID NO: 36084 - RNA, 20 nt, Artificial Sequence
  HTT spacer sequence TTCN PAM
uaaaaguguuguucacgcca

SEQ ID NO: 36085 - RNA, 20 nt, Artificial Sequence
  HTT spacer sequence TTCN PAM
cgccacauuguugaugccuc

SEQ ID NO: 36086 - RNA, 20 nt, Artificial Sequence
  HTT spacer sequence TTCN PAM
cuguaguuguugaagacucu

SEQ ID NO: 36087 - RNA, 20 nt, Artificial Sequence
  HTT spacer sequence TTCN PAM
acaacuacagugaaaaaaau

SEQ ID NO: 36088 - RNA, 20 nt, Artificial Sequence
  HTT spacer sequence TTCN PAM
aaccccagcaagucacaagg

SEQ ID NO: 36089 - RNA, 20 nt, Artificial Sequence
  HTT spacer sequence TTCN PAM
uggccccguacacccacuuc

SEQ ID NO: 36090 - RNA, 20 nt, Artificial Sequence
  HTT spacer sequence TTCN PAM
cccaggcccucgcugacgcc

SEQ ID NO: 36091 - RNA, 20 nt, Artificial Sequence
  HTT spacer sequence TTCN PAM
ucaggcuggcgucagcgagg

SEQ ID NO: 36092 - RNA, 20 nt, Artificial Sequence
  HTT spacer sequence TTCN PAM
ccugcuccgccugcaccaug

SEQ ID NO: 36093 - RNA, 20 nt, Artificial Sequence
  HTT spacer sequence TTCN PAM
ugccacaacuguuaccccga

SEQ ID NO: 36094 - RNA, 20 nt, Artificial Sequence
  HTT spacer sequence TTCN PAM
accaacgacagcauucuugc

SEQ ID NO: 36095 - RNA, 20 nt, Artificial Sequence
  HTT spacer sequence TTCN PAM
ugcuuccaccaacgacagca

SEQ ID NO: 36096 - RNA, 20 nt, Artificial Sequence
  HTT spacer sequence TTCN PAM
ugcuugcucuuucgugcuuc

SEQ ID NO: 36097 - RNA, 20 nt, Artificial Sequence
  HTT spacer sequence TTCN PAM
uuuacaaaguauuuccugcu

SEQ ID NO: 36098 - RNA, 20 nt, Artificial Sequence
  HTT spacer sequence TTCN PAM
uuuuuauucuuuuacaaagu

SEQ ID NO: 36099 - RNA, 20 nt, Artificial Sequence
  HTT spacer sequence TTCN PAM
cuaacauuuuucguuuuuau

SEQ ID NO: 36100 - RNA, 20 nt, Artificial Sequence
  HTT spacer sequence TTCN PAM
aauagucugcuguauucaga

SEQ ID NO: 36101 - RNA, 20 nt, Artificial Sequence
  HTT spacer sequence TTCN PAM
gagaacucuaggagauauau

SEQ ID NO: 36102 - RNA, 20 nt, Artificial Sequence
  HTT spacer sequence TTCN PAM
cugaauacagcagacuauua

SEQ ID NO: 36103 - RNA, 20 nt, Artificial Sequence
  HTT spacer sequence TTCN PAM
aagaaguguguggccaguga

SEQ ID NO: 36104 - RNA, 20 nt, Artificial Sequence
  HTT spacer sequence TTCN PAM
uggaaggccgggcuaugccu

SEQ ID NO: 36105 - RNA, 20 nt, Artificial Sequence
  HTT spacer sequence TTCN PAM
uccuccucuacccccaccuc

SEQ ID NO: 36106 - RNA, 20 nt, Artificial Sequence
  HTT spacer sequence TTCN PAM
cagcccacucaguguuccuc

SEQ ID NO: 36107 - RNA, 20 nt, Artificial Sequence
  HTT spacer sequence TTCN PAM
gguuugcugacacacuuugg

SEQ ID NO: 36108 - RNA, 20 nt, Artificial Sequence
  HTT spacer sequence TTCN PAM
uaauguccccacccauucaa

SEQ ID NO: 36109 - RNA, 20 nt, Artificial Sequence
  HTT spacer sequence TTCN PAM
aagcacaggaccuguagagu

SEQ ID NO: 36110 - RNA, 20 nt, Artificial Sequence
  HTT spacer sequence TTCN PAM
ggccuguaacaaggaugaaa

SEQ ID NO: 36111 - RNA, 20 nt, Artificial Sequence
  HTT spacer sequence TTCN PAM
uccuuguuacaggccugaaa

SEQ ID NO: 36112 - RNA, 20 nt, Artificial Sequence
  HTT spacer sequence TTCN PAM
uucauccuuguuacaggccu

SEQ ID NO: 36113 - RNA, 20 nt, Artificial Sequence
  HTT spacer sequence TTCN PAM
uagcagcacaguagugcugg

SEQ ID NO: 36114 - RNA, 20 nt, Artificial Sequence
  HTT spacer sequence TTCN PAM
gaggugugugaaggccauag

SEQ ID NO: 36115 - RNA, 20 nt, Artificial Sequence
  HTT spacer sequence TTCN PAM
cacaccucugaacaccagca

SEQ ID NO: 36116 - RNA, 20 nt, Artificial Sequence
  HTT spacer sequence TTCN PAM
auggccuucacacaccucug

SEQ ID NO: 36117 - RNA, 20 nt, Artificial Sequence
  HTT spacer sequence TTCN PAM
agucauaaagcugacaaaac

SEQ ID NO: 36118 - RNA, 20 nt, Artificial Sequence
  HTT spacer sequence TTCN PAM
cuuaaauuuguuuuuuuuuu

SEQ ID NO: 36119 - RNA, 20 nt, Artificial Sequence
  HTT spacer sequence TTCN PAM
ugccauucuccugccucagc

SEQ ID NO: 36120 - RNA, 20 nt, Artificial Sequence
  HTT spacer sequence TTCN PAM
ccugccucagccucccgagu

SEQ ID NO: 36121 - RNA, 20 nt, Artificial Sequence
  HTT spacer sequence TTCN PAM
ccauguuagccaggaugguc

SEQ ID NO: 36122 - RNA, 20 nt, Artificial Sequence
  HTT spacer sequence TTCN PAM
cuuaaauuuauguuuguguu

SEQ ID NO: 36123 - RNA, 20 nt, Artificial Sequence
  HTT spacer sequence TTCN PAM
uaaauugccuuaaguaugaa

SEQ ID NO: 36124 - RNA, 20 nt, Artificial Sequence
  HTT spacer sequence TTCN PAM
uacuuaaggcaauuuaagaa

SEQ ID NO: 36125 - RNA, 20 nt, Artificial Sequence
  HTT spacer sequence TTCN PAM
auuauugcuacuauacagau

SEQ ID NO: 36126 - RNA, 20 nt, Artificial Sequence
  HTT spacer sequence TTCN PAM
uuuuauaaauuuagcgauua

SEQ ID NO: 36127 - RNA, 20 nt, Artificial Sequence
  HTT spacer sequence TTCN PAM
uugacuccugacucuagugu

SEQ ID NO: 36128 - RNA, 20 nt, Artificial Sequence
  HTT spacer sequence TTCN PAM
aggcuguauguuagugaugu

SEQ ID NO: 36129 - RNA, 20 nt, Artificial Sequence
  HTT spacer sequence TTCN PAM
ggaguaagucuguuucaaug

SEQ ID NO: 36130 - RNA, 20 nt, Artificial Sequence
  HTT spacer sequence TTCN PAM
augcuuucuguaaccauuug

SEQ ID NO: 36131 - RNA, 20 nt, Artificial Sequence
  HTT spacer sequence TTCN PAM
guaaccauuugggguauuaa

SEQ ID NO: 36132 - RNA, 20 nt, Artificial Sequence
  HTT spacer sequence TTCN PAM
uauauguuucuuagaaggga

SEQ ID NO: 36133 - RNA, 20 nt, Artificial Sequence
  HTT spacer sequence TTCN PAM
uagaagggauaucauugaug

SEQ ID NO: 36134 - RNA, 20 nt, Artificial Sequence
  HTT spacer sequence TTCN PAM
aagaaacauauaugaaauua

SEQ ID NO: 36135 - RNA, 20 nt, Artificial Sequence
  HTT spacer sequence TTCN PAM
ucuaaauuacugaucuuuua

SEQ ID NO: 36136 - RNA, 20 nt, Artificial Sequence
  HTT spacer sequence TTCN PAM
aaauuacugaucuuuuaaau

SEQ ID NO: 36137 - RNA, 20 nt, Artificial Sequence
  HTT spacer sequence TTCN PAM
ccuuucucucaaaucucacu

SEQ ID NO: 36138 - RNA, 20 nt, Artificial Sequence
  HTT spacer sequence TTCN PAM
cucaaaucucacuuaagacu

SEQ ID NO: 36139 - RNA, 20 nt, Artificial Sequence
  HTT spacer sequence TTCN PAM
uguagcagaaaaaagcucag

SEQ ID NO: 36140 - RNA, 20 nt, Artificial Sequence
  HTT spacer sequence TTCN PAM
gcuacaggaaacugacuacu

SEQ ID NO: 36141 - RNA, 20 nt, Artificial Sequence
  HTT spacer sequence TTCN PAM
gcgagugaggagacuugaug

SEQ ID NO: 36142 - RNA, 20 nt, Artificial Sequence
  HTT spacer sequence TTCN PAM
gauaaugacacucuauuuag

SEQ ID NO: 36143 - RNA, 20 nt, Artificial Sequence
  HTT spacer sequence TTCN PAM
aguuguuucucaaucugaca

SEQ ID NO: 36144 - RNA, 20 nt, Artificial Sequence
  HTT spacer sequence TTCN PAM
caaucugacacguucugauc

SEQ ID NO: 36145 - RNA, 20 nt, Artificial Sequence
  HTT spacer sequence TTCN PAM
gaucgugugaaugugaaauu

SEQ ID NO: 36146 - RNA, 20 nt, Artificial Sequence
  HTT spacer sequence TTCN PAM
cacgaucagaacgugucaga

SEQ ID NO: 36147 - RNA, 20 nt, Artificial Sequence
  HTT spacer sequence TTCN PAM
cauucacacgaucagaacgu

SEQ ID NO: 36148 - RNA, 20 nt, Artificial Sequence
  HTT spacer sequence TTCN PAM
cauucucugcuucccuuuua

SEQ ID NO: 36149 - RNA, 20 nt, Artificial Sequence
  HTT spacer sequence TTCN PAM
cugcuucccuuuuauuccca

SEQ ID NO: 36150 - RNA, 20 nt, Artificial Sequence
  HTT spacer sequence TTCN PAM
cuuuuauucccauuuggcag

SEQ ID NO: 36151 - RNA, 20 nt, Artificial Sequence
  HTT spacer sequence TTCN PAM
cauuuggcagaugguuugau

SEQ ID NO: 36152 - RNA, 20 nt, Artificial Sequence
  HTT spacer sequence TTCN PAM
ggaggacaucaaaccaucug

SEQ ID NO: 36153 - RNA, 20 nt, Artificial Sequence
  HTT spacer sequence TTCN PAM
acuggguagacacuuucugg

SEQ ID NO: 36154 - RNA, 20 nt, Artificial Sequence
  HTT spacer sequence TTCN PAM
uugugacacucgugagguuu

SEQ ID NO: 36155 - RNA, 20 nt, Artificial Sequence
  HTT spacer sequence TTCN PAM
caugccacaaacggcaccau

SEQ ID NO: 36156 - RNA, 20 nt, Artificial Sequence
  HTT spacer sequence TTCN PAM
ucucuagcacugacacgccu

SEQ ID NO: 36157 - RNA, 20 nt, Artificial Sequence
  HTT spacer sequence TTCN PAM
agguauuuugcuugaagcuu

SEQ ID NO: 36158 - RNA, 20 nt, Artificial Sequence
  HTT spacer sequence TTCN PAM
agcaaaauaccuggaaaguc

SEQ ID NO: 36159 - RNA, 20 nt, Artificial Sequence
  HTT spacer sequence TTCN PAM
acuaaaagcuucaagcaaaa

SEQ ID NO: 36160 - RNA, 20 nt, Artificial Sequence
  HTT spacer sequence TTCN PAM
uucuuucuuuuuuucuuuuu

SEQ ID NO: 36161 - RNA, 20 nt, Artificial Sequence
  HTT spacer sequence TTCN PAM
uucuuuuuuucuuuuuuaua

SEQ ID NO: 36162 - RNA, 20 nt, Artificial Sequence
  HTT spacer sequence TTCN PAM
uuuuuucuuuuuuauagaau

SEQ ID NO: 36163 - RNA, 20 nt, Artificial Sequence
  HTT spacer sequence TTCN PAM
uuuuuauagaaugcuauuca

SEQ ID NO: 36164 - RNA, 20 nt, Artificial Sequence
  HTT spacer sequence TTCN PAM
auaaaaaagaaaaaaagaaa

SEQ ID NO: 36165 - RNA, 20 nt, Artificial Sequence
  HTT spacer sequence TTCN PAM
uaaucacauucguuuguuug

SEQ ID NO: 36166 - RNA, 20 nt, Artificial Sequence
  HTT spacer sequence TTCN PAM
uuuguuugaaccucuuguua

SEQ ID NO: 36167 - RNA, 20 nt, Artificial Sequence
  HTT spacer sequence TTCN PAM
aacaaacgaaugugauuaug

SEQ ID NO: 36168 - RNA, 20 nt, Artificial Sequence
  HTT spacer sequence TTCN PAM
guaacugcacacauguugua

SEQ ID NO: 36169 - RNA, 20 nt, Artificial Sequence
  HTT spacer sequence TTCN PAM
guuacggguuaauuacuguc

SEQ ID NO: 36170 - RNA, 20 nt, Artificial Sequence
  HTT spacer sequence TTCN PAM
ggauucagaucagguuuguc

SEQ ID NO: 36171 - RNA, 20 nt, Artificial Sequence
  HTT spacer sequence TTCN PAM
gaucagguuugucacuuuua

SEQ ID NO: 36172 - RNA, 20 nt, Artificial Sequence
  HTT spacer sequence TTCN PAM
uccaucauaccuguuccuaa

SEQ ID NO: 36173 - RNA, 20 nt, Artificial Sequence
  HTT spacer sequence TTCN PAM
uaauuuaguacaaauuaccc

SEQ ID NO: 36174 - RNA, 20 nt, Artificial Sequence
  HTT spacer sequence TTCN PAM
gugucuuuuaggguaauuug

SEQ ID NO: 36175 - RNA, 20 nt, Artificial Sequence
  HTT spacer sequence TTCN PAM
uuaaaguagauuucaguguc

SEQ ID NO: 36176 - RNA, 20 nt, Artificial Sequence
  HTT spacer sequence TTCN PAM
cucaucaguugcugcugcuu

SEQ ID NO: 36177 - RNA, 20 nt, Artificial Sequence
  HTT spacer sequence TTCN PAM
ugcaccuagcuggugcagaa

SEQ ID NO: 36178 - RNA, 20 nt, Artificial Sequence
  HTT spacer sequence TTCN PAM
gcaccagcuaggugcaugaa

SEQ ID NO: 36179 - RNA, 20 nt, Artificial Sequence
  HTT spacer sequence TTCN PAM
aaagguuugucccauccacu

SEQ ID NO: 36180 - RNA, 20 nt, Artificial Sequence
  HTT spacer sequence TTCN PAM
aacuuauuuuggaggggagg

SEQ ID NO: 36181 - RNA, 20 nt, Artificial Sequence
  HTT spacer sequence TTCN PAM
ccaaacaauaaaucuuaauu

SEQ ID NO: 36182 - RNA, 20 nt, Artificial Sequence
  HTT spacer sequence TTCN PAM
agcuaucuaacagguucacu

SEQ ID NO: 36183 - RNA, 20 nt, Artificial Sequence
  HTT spacer sequence TTCN PAM
cuuaccucuuuaaaaaggaa

SEQ ID NO: 36184 - RNA, 20 nt, Artificial Sequence
  HTT spacer sequence TTCN PAM
uuuuuaaagagguaagugaa

SEQ ID NO: 36185 - RNA, 20 nt, Artificial Sequence
  HTT spacer sequence TTCN PAM
auuccuuuuuaaagagguaa

SEQ ID NO: 36186 - RNA, 20 nt, Artificial Sequence
  HTT spacer sequence TTCN PAM
ccucuugacugcauuaccuu

SEQ ID NO: 36187 - RNA, 20 nt, Artificial Sequence
  HTT spacer sequence TTCN PAM
uccuauaguugcugugggca

SEQ ID NO: 36188 - RNA, 20 nt, Artificial Sequence
  HTT spacer sequence TTCN PAM
ggcuaguccugucccuucau

SEQ ID NO: 36189 - RNA, 20 nt, Artificial Sequence
  HTT spacer sequence TTCN PAM
ugaugcacauuuuccucaag

SEQ ID NO: 36190 - RNA, 20 nt, Artificial Sequence
  HTT spacer sequence TTCN PAM
ucaagauucgucccaguuaa

SEQ ID NO: 36191 - RNA, 20 nt, Artificial Sequence
  HTT spacer sequence TTCN PAM
ucccaguuaaaucacugcag

SEQ ID NO: 36192 - RNA, 20 nt, Artificial Sequence
  HTT spacer sequence TTCN PAM
ucugcagugauuuaacuggg

SEQ ID NO: 36193 - RNA, 20 nt, Artificial Sequence
  HTT spacer sequence TTCN PAM
ucgucaaaauuuaacuguca

SEQ ID NO: 36194 - RNA, 20 nt, Artificial Sequence
  HTT spacer sequence TTCN PAM
uaugugggguaggaauauuu

SEQ ID NO: 36195 - RNA, 20 nt, Artificial Sequence
  HTT spacer sequence TTCN PAM
uaccccacauaagaaaguag

SEQ ID NO: 36196 - RNA, 20 nt, Artificial Sequence
  HTT spacer sequence TTCN PAM
aacucacaaauauuccuacc

SEQ ID NO: 36197 - RNA, 20 nt, Artificial Sequence
  HTT spacer sequence TTCN PAM
cuauuuccuucuagacguaa

SEQ ID NO: 36198 - RNA, 20 nt, Artificial Sequence
  HTT spacer sequence TTCN PAM
uucuagacguaaaucuguua

SEQ ID NO: 36199 - RNA, 20 nt, Artificial Sequence
  HTT spacer sequence TTCN PAM
agacguaaaucuguuaaucc

SEQ ID NO: 36200 - RNA, 20 nt, Artificial Sequence
  HTT spacer sequence TTCN PAM
ggugaguaacagugcugaca

SEQ ID NO: 36201 - RNA, 20 nt, Artificial Sequence
  HTT spacer sequence TTCN PAM
cuaggagaacugagggcacu

SEQ ID NO: 36202 - RNA, 20 nt, Artificial Sequence
  HTT spacer sequence TTCN PAM
ccuagggaaacagacccuuu

SEQ ID NO: 36203 - RNA, 20 nt, Artificial Sequence
  HTT spacer sequence TTCN PAM
acaguggguauugggguggu

SEQ ID NO: 36204 - RNA, 20 nt, Artificial Sequence
  HTT spacer sequence TTCN PAM
cgccauucuccugccucagc

SEQ ID NO: 36205 - RNA, 20 nt, Artificial Sequence
  HTT spacer sequence TTCN PAM
ccugccucagccucccgagu

SEQ ID NO: 36206 - RNA, 20 nt, Artificial Sequence
  HTT spacer sequence TTCN PAM
cuguguuagccaggaugguc

SEQ ID NO: 36207 - RNA, 20 nt, Artificial Sequence
  HTT spacer sequence TTCN PAM
uuaaaagcagaccccaggcc

SEQ ID NO: 36208 - RNA, 20 nt, Artificial Sequence
  HTT spacer sequence TTCN PAM
ucuuucuuucacaaaaccug

SEQ ID NO: 36209 - RNA, 20 nt, Artificial Sequence
  HTT spacer sequence TTCN PAM
uucacaaaaccuguccgaag

SEQ ID NO: 36210 - RNA, 20 nt, Artificial Sequence
  HTT spacer sequence TTCN PAM
caaaaccuguccgaagaaaa

SEQ ID NO: 36211 - RNA, 20 nt, Artificial Sequence
  HTT spacer sequence TTCN PAM
gacagguuuugugaaagaaa

SEQ ID NO: 36212 - RNA, 20 nt, Artificial Sequence
  HTT spacer sequence TTCN PAM
ucggacagguuuugugaaag

SEQ ID NO: 36213 - RNA, 20 nt, Artificial Sequence
  HTT spacer sequence TTCN PAM
ugaggagagcaauggcccau

SEQ ID NO: 36214 - RNA, 20 nt, Artificial Sequence
  HTT spacer sequence TTCN PAM
caaugacuauuuccugagga

SEQ ID NO: 36215 - RNA, 20 nt, Artificial Sequence
  HTT spacer sequence TTCN PAM
uuuccuuuccuuugacacua

SEQ ID NO: 36216 - RNA, 20 nt, Artificial Sequence
  HTT spacer sequence TTCN PAM
uuuccuuugacacuaggagg

SEQ ID NO: 36217 - RNA, 20 nt, Artificial Sequence
  HTT spacer sequence TTCN PAM
uuugacacuaggaggcugac

SEQ ID NO: 36218 - RNA, 20 nt, Artificial Sequence
  HTT spacer sequence TTCN PAM
ccccagucagccuccuagug

SEQ ID NO: 36219 - RNA, 20 nt, Artificial Sequence
  HTT spacer sequence TTCN PAM
cuugggguacccgugccccc

SEQ ID NO: 36220 - RNA, 20 nt, Artificial Sequence
  HTT spacer sequence TTCN PAM
auucuaguaagaacaaagac

SEQ ID NO: 36221 - RNA, 20 nt, Artificial Sequence
  HTT spacer sequence TTCN PAM
aguaagaacaaagacugcuc

SEQ ID NO: 36222 - RNA, 20 nt, Artificial Sequence
  HTT spacer sequence TTCN PAM
uacuagaauggaacaaauca

SEQ ID NO: 36223 - RNA, 20 nt, Artificial Sequence
  HTT spacer sequence TTCN PAM
uguuuguucugauugccuuu

SEQ ID NO: 36224 - RNA, 20 nt, Artificial Sequence
  HTT spacer sequence TTCN PAM
gauugccuuucaucaaccgg

SEQ ID NO: 36225 - RNA, 20 nt, Artificial Sequence
  HTT spacer sequence TTCN PAM
ucaaccgguccccuuucucc

SEQ ID NO: 36226 - RNA, 20 nt, Artificial Sequence
  HTT spacer sequence TTCN PAM
cccaguucuuaagauucagu

SEQ ID NO: 36227 - RNA, 20 nt, Artificial Sequence
  HTT spacer sequence TTCN PAM
uaagauucaguacagugaca

SEQ ID NO: 36228 - RNA, 20 nt, Artificial Sequence
  HTT spacer sequence TTCN PAM
guacagugacaguuuuauga

SEQ ID NO: 36229 - RNA, 20 nt, Artificial Sequence
  HTT spacer sequence TTCN PAM
uaaaacugucacuguacuga

SEQ ID NO: 36230 - RNA, 20 nt, Artificial Sequence
  HTT spacer sequence TTCN PAM
uguucauaaaacugucacug

SEQ ID NO: 36231 - RNA, 20 nt, Artificial Sequence
  HTT spacer sequence TTCN PAM
auucuuguucauaaaacugu

SEQ ID NO: 36232 - RNA, 20 nt, Artificial Sequence
  HTT spacer sequence TTCN PAM
aguguucuauucuuguucau

SEQ ID NO: 36233 - RNA, 20 nt, Artificial Sequence
  HTT spacer sequence TTCN PAM
augguuugucuguucuagug

SEQ ID NO: 36234 - RNA, 20 nt, Artificial Sequence
  HTT spacer sequence TTCN PAM
gcccagaggcucugagaaaa

SEQ ID NO: 36235 - RNA, 20 nt, Artificial Sequence
  HTT spacer sequence TTCN PAM
cagagccucugggcagaaug

SEQ ID NO: 36236 - RNA, 20 nt, Artificial Sequence
  HTT spacer sequence TTCN PAM
auggauaaagcauggagcau

SEQ ID NO: 36237 - RNA, 20 nt, Artificial Sequence
  HTT spacer sequence TTCN PAM
caaccugacggggagcuucc

SEQ ID NO: 36238 - RNA, 20 nt, Artificial Sequence
  HTT spacer sequence TTCN PAM
cugcagcugucagcuuuccc

SEQ ID NO: 36239 - RNA, 20 nt, Artificial Sequence
  HTT spacer sequence TTCN PAM
ucccccaaccaucugagagg

SEQ ID NO: 36240 - RNA, 20 nt, Artificial Sequence
  HTT spacer sequence TTCN PAM
gggaaucugugccacccuau

SEQ ID NO: 36241 - RNA, 20 nt, Artificial Sequence
  HTT spacer sequence TTCN PAM
cugaaacugguuuaguaaua

SEQ ID NO: 36242 - RNA, 20 nt, Artificial Sequence
  HTT spacer sequence TTCN PAM
cguuaauggcagauagggug

SEQ ID NO: 36243 - RNA, 20 nt, Artificial Sequence
  HTT spacer sequence TTCN PAM
aagagacaucagacaauacc

SEQ ID NO: 36244 - RNA, 20 nt, Artificial Sequence
  HTT spacer sequence TTCN PAM
aaugagauuucaccucaggg

SEQ ID NO: 36245 - RNA, 20 nt, Artificial Sequence
  HTT spacer sequence TTCN PAM
ccucaggguauaguaaaguu

SEQ ID NO: 36246 - RNA, 20 nt, Artificial Sequence
  HTT spacer sequence TTCN PAM
uggauguguucugcaauuau

SEQ ID NO: 36247 - RNA, 20 nt, Artificial Sequence
  HTT spacer sequence TTCN PAM
gcaauuaucuaggcugauuu

SEQ ID NO: 36248 - RNA, 20 nt, Artificial Sequence
  HTT spacer sequence TTCN PAM
gaauagaguuaugcuuauag

SEQ ID NO: 36249 - RNA, 20 nt, Artificial Sequence
  HTT spacer sequence TTCN PAM
gaaaucagccuagauaauug

SEQ ID NO: 36250 - RNA, 20 nt, Artificial Sequence
  HTT spacer sequence TTCN PAM
ugacagcugauaaauuugac

SEQ ID NO: 36251 - RNA, 20 nt, Artificial Sequence
  HTT spacer sequence TTCN PAM
uccugcuuaucugcauaaau

SEQ ID NO: 36252 - RNA, 20 nt, Artificial Sequence
  HTT spacer sequence TTCN PAM
uuuccuccugcuuaucugca

SEQ ID NO: 36253 - RNA, 20 nt, Artificial Sequence
  HTT spacer sequence TTCN PAM
caucaauaauaggauuaaaa

SEQ ID NO: 36254 - RNA, 20 nt, Artificial Sequence
  HTT spacer sequence TTCN PAM
uuccuguagguguuuauugg

SEQ ID NO: 36255 - RNA, 20 nt, Artificial Sequence
  HTT spacer sequence TTCN PAM
uguagguguuuauuggcuuu

SEQ ID NO: 36256 - RNA, 20 nt, Artificial Sequence
  HTT spacer sequence TTCN PAM
auacaaagccaauaaacacc

SEQ ID NO: 36257 - RNA, 20 nt, Artificial Sequence
  HTT spacer sequence TTCN PAM
aacuguuucaauacaaagcc

SEQ ID NO: 36258 - RNA, 20 nt, Artificial Sequence
  HTT spacer sequence TTCN PAM
auguauucaaacuguuucaa

SEQ ID NO: 36259 - RNA, 20 nt, Artificial Sequence
  HTT spacer sequence TTCN PAM
gguaauagcauuuuauuauu

SEQ ID NO: 36260 - RNA, 20 nt, Artificial Sequence
  HTT spacer sequence TTCN PAM
ucuucuuguguacuuacaug

SEQ ID NO: 36261 - RNA, 20 nt, Artificial Sequence
  HTT spacer sequence TTCN PAM
ucuuguguacuuacauguaa

SEQ ID NO: 36262 - RNA, 20 nt, Artificial Sequence
  HTT spacer sequence TTCN PAM
uguguacuuacauguaauuu

SEQ ID NO: 36263 - RNA, 20 nt, Artificial Sequence
  HTT spacer sequence TTCN PAM
cuuaauaaccuaaauuacau

SEQ ID NO: 36264 - RNA, 20 nt, Artificial Sequence
  HTT spacer sequence TTCN PAM
uuaaauggaaaucugacuaa

SEQ ID NO: 36265 - RNA, 20 nt, Artificial Sequence
  HTT spacer sequence TTCN PAM
auuuaaagaaaacagcaaaa

SEQ ID NO: 36266 - RNA, 20 nt, Artificial Sequence
  HTT spacer sequence TTCN PAM
cuuaaaaauuaauguauauc

SEQ ID NO: 36267 - RNA, 20 nt, Artificial Sequence
  HTT spacer sequence TTCN PAM
aaacaagucuugagauauac

SEQ ID NO: 36268 - RNA, 20 nt, Artificial Sequence
  HTT spacer sequence TTCN PAM
gauacauaacuacuuccaaa

SEQ ID NO: 36269 - RNA, 20 nt, Artificial Sequence
  HTT spacer sequence TTCN PAM
auauguugucaguauucauu

SEQ ID NO: 36270 - RNA, 20 nt, Artificial Sequence
  HTT spacer sequence TTCN PAM
uugcacauuucaaagcauuu

SEQ ID NO: 36271 - RNA, 20 nt, Artificial Sequence
  HTT spacer sequence TTCN PAM
aagcauuuaauuguguugac

SEQ ID NO: 36272 - RNA, 20 nt, Artificial Sequence
  HTT spacer sequence TTCN PAM
accaucugucaacacaauua

SEQ ID NO: 36273 - RNA, 20 nt, Artificial Sequence
  HTT spacer sequence TTCN PAM
uuccaccaucugucaacaca

SEQ ID NO: 36274 - RNA, 20 nt, Artificial Sequence
  HTT spacer sequence TTCN PAM
uagagaaagcaguuuuauau

SEQ ID NO: 36275 - RNA, 20 nt, Artificial Sequence
  HTT spacer sequence TTCN PAM
cuaagaagauuuaaaaacua

SEQ ID NO: 36276 - RNA, 20 nt, Artificial Sequence
  HTT spacer sequence TTCN PAM
cugcagcuuuuucuugcuag

SEQ ID NO: 36277 - RNA, 20 nt, Artificial Sequence
  HTT spacer sequence TTCN PAM
ugcuagauguugagguuuua

SEQ ID NO: 36278 - RNA, 20 nt, Artificial Sequence
  HTT spacer sequence TTCN PAM
ugcuaguccauuacagguuu

SEQ ID NO: 36279 - RNA, 20 nt, Artificial Sequence
  HTT spacer sequence TTCN PAM
uuuaguaccuaaaaugcuua

SEQ ID NO: 36280 - RNA, 20 nt, Artificial Sequence
  HTT spacer sequence TTCN PAM
uaauuacaauguuuauuaag

SEQ ID NO: 36281 - RNA, 20 nt, Artificial Sequence
  HTT spacer sequence TTCN PAM
gcacuaaauuuuccuaauua

SEQ ID NO: 36282 - RNA, 20 nt, Artificial Sequence
  HTT spacer sequence TTCN PAM
uucugcacuaaauuuuccua

SEQ ID NO: 36283 - RNA, 20 nt, Artificial Sequence
  HTT spacer sequence TTCN PAM
cagauucccuggggucugga

SEQ ID NO: 36284 - RNA, 20 nt, Artificial Sequence
  HTT spacer sequence TTCN PAM
cuggggucuggaaacauagu

SEQ ID NO: 36285 - RNA, 20 nt, Artificial Sequence
  HTT spacer sequence TTCN PAM
agaccccagggaaucuggga

SEQ ID NO: 36286 - RNA, 20 nt, Artificial Sequence
  HTT spacer sequence TTCN PAM
aauuacaugacaccuccacu

SEQ ID NO: 36287 - RNA, 20 nt, Artificial Sequence
  HTT spacer sequence TTCN PAM
cuuuugaguuucaauuucuu

SEQ ID NO: 36288 - RNA, 20 nt, Artificial Sequence
  HTT spacer sequence TTCN PAM
auuucuucaagagcaaagag

SEQ ID NO: 36289 - RNA, 20 nt, Artificial Sequence
  HTT spacer sequence TTCN PAM
ucaagagcaaagaggcagag

SEQ ID NO: 36290 - RNA, 20 nt, Artificial Sequence
  HTT spacer sequence TTCN PAM
agagcaaagaggcagaggag

SEQ ID NO: 36291 - RNA, 20 nt, Artificial Sequence
  HTT spacer sequence TTCN PAM
uagcucuccucugccucuuu

SEQ ID NO: 36292 - RNA, 20 nt, Artificial Sequence
  HTT spacer sequence TTCN PAM
accugcugccuccgaaccuu

SEQ ID NO: 36293 - RNA, 20 nt, Artificial Sequence
  HTT spacer sequence TTCN PAM
gaggcagcagguagaaggca

SEQ ID NO: 36294 - RNA, 20 nt, Artificial Sequence
  HTT spacer sequence TTCN PAM
accuugacagcaagcacaca

SEQ ID NO: 36295 - RNA, 20 nt, Artificial Sequence
  HTT spacer sequence TTCN PAM
ugauucaaccuugacagcaa

SEQ ID NO: 36296 - RNA, 20 nt, Artificial Sequence
  HTT spacer sequence TTCN PAM
uuuaaaauuaagauacauau

SEQ ID NO: 36297 - RNA, 20 nt, Artificial Sequence
  HTT spacer sequence TTCN PAM
cuaaaaacaaaaacauccau

SEQ ID NO: 36298 - RNA, 20 nt, Artificial Sequence
  HTT spacer sequence TTCN PAM
aaacaucuuuuucuucuugg

SEQ ID NO: 36299 - RNA, 20 nt, Artificial Sequence
  HTT spacer sequence TTCN PAM
ucuugguauuacuaucuuau

SEQ ID NO: 36300 - RNA, 20 nt, Artificial Sequence
  HTT spacer sequence TTCN PAM
ugguauuacuaucuuaugaa

SEQ ID NO: 36301 - RNA, 20 nt, Artificial Sequence
  HTT spacer sequence TTCN PAM
uaagauaguaauaccaagaa

SEQ ID NO: 36302 - RNA, 20 nt, Artificial Sequence
  HTT spacer sequence TTCN PAM
aaacagaucauuggaauucc

SEQ ID NO: 36303 - RNA, 20 nt, Artificial Sequence
  HTT spacer sequence TTCN PAM
aaugaucuguuuugaaugau

SEQ ID NO: 36304 - RNA, 20 nt, Artificial Sequence
  HTT spacer sequence TTCN PAM
uaaaaucauucagcucugug

SEQ ID NO: 36305 - RNA, 20 nt, Artificial Sequence
  HTT spacer sequence TTCN PAM
gcucugugauggcaucaugg

SEQ ID NO: 36306 - RNA, 20 nt, Artificial Sequence
  HTT spacer sequence TTCN PAM
acuggccaugaugccaucac

SEQ ID NO: 36307 - RNA, 20 nt, Artificial Sequence
  HTT spacer sequence TTCN PAM
uuccacuggccaugaugcca

SEQ ID NO: 36308 - RNA, 20 nt, Artificial Sequence
  HTT spacer sequence TTCN PAM
cugucgucuucggugucgug

SEQ ID NO: 36309 - RNA, 20 nt, Artificial Sequence
  HTT spacer sequence TTCN PAM
gugucgugaugugcuuggca

SEQ ID NO: 36310 - RNA, 20 nt, Artificial Sequence
  HTT spacer sequence TTCN PAM
uuuucauauacccacuuuga

SEQ ID NO: 36311 - RNA, 20 nt, Artificial Sequence
  HTT spacer sequence TTCN PAM
uauacccacuuugaacguug

SEQ ID NO: 36312 - RNA, 20 nt, Artificial Sequence
  HTT spacer sequence TTCN PAM
aaguggguauaugaaaacga

SEQ ID NO: 36313 - RNA, 20 nt, Artificial Sequence
  HTT spacer sequence TTCN PAM
caggcucugcaugugugucu

SEQ ID NO: 36314 - RNA, 20 nt, Artificial Sequence
  HTT spacer sequence TTCN PAM
cauacacagacacacaugca

SEQ ID NO: 36315 - RNA, 20 nt, Artificial Sequence
  HTT spacer sequence TTCN PAM
aaagagaagagagcauauuc

SEQ ID NO: 36316 - RNA, 20 nt, Artificial Sequence
  HTT spacer sequence TTCN PAM
cuuuugaaacgucucuaacc

SEQ ID NO: 36317 - RNA, 20 nt, Artificial Sequence
  HTT spacer sequence TTCN PAM
uuacucucagcaauuuguaa

SEQ ID NO: 36318 - RNA, 20 nt, Artificial Sequence
  HTT spacer sequence TTCN PAM
cagggaaaaaaauucaagaa

SEQ ID NO: 36319 - RNA, 20 nt, Artificial Sequence
  HTT spacer sequence TTCN PAM
cugagaagauuacaaauugc

SEQ ID NO: 36320 - RNA, 20 nt, Artificial Sequence
  HTT spacer sequence TTCN PAM
agaaacaguaagauaaccua

SEQ ID NO: 36321 - RNA, 20 nt, Artificial Sequence
  HTT spacer sequence TTCN PAM
ugaauuuuuuucccugagaa

SEQ ID NO: 36322 - RNA, 20 nt, Artificial Sequence
  HTT spacer sequence TTCN PAM
gaauauaaaguuccuguuca

SEQ ID NO: 36323 - RNA, 20 nt, Artificial Sequence
  HTT spacer sequence TTCN PAM
gaaucuaucuguaccuuagg

SEQ ID NO: 36324 - RNA, 20 nt, Artificial Sequence
  HTT spacer sequence TTCN PAM
uguucauucacaugaaacgc

SEQ ID NO: 36325 - RNA, 20 nt, Artificial Sequence
  HTT spacer sequence TTCN PAM
uucacaugaaacgcuaaaag

SEQ ID NO: 36326 - RNA, 20 nt, Artificial Sequence
  HTT spacer sequence TTCN PAM
caugaaacgcuaaaaguucu

SEQ ID NO: 36327 - RNA, 20 nt, Artificial Sequence
  HTT spacer sequence TTCN PAM
ugugaaugaacaggaacuuu

SEQ ID NO: 36328 - RNA, 20 nt, Artificial Sequence
  HTT spacer sequence TTCN PAM
ucacuugaucuuagccaaaa

SEQ ID NO: 36329 - RNA, 20 nt, Artificial Sequence
  HTT spacer sequence TTCN PAM
cuugaucuuagccaaaaggc

SEQ ID NO: 36330 - RNA, 20 nt, Artificial Sequence
  HTT spacer sequence TTCN PAM
uggccuuuuggcuaagauca

SEQ ID NO: 36331 - RNA, 20 nt, Artificial Sequence
  HTT spacer sequence TTCN PAM
uaaaucgaacuugccgugaa

SEQ ID NO: 36332 - RNA, 20 nt, Artificial Sequence
  HTT spacer sequence TTCN PAM
auuuaagaauuuuuaguguu

SEQ ID NO: 36333 - RNA, 20 nt, Artificial Sequence
  HTT spacer sequence TTCN PAM
cggcaaguucgauuuaagaa

SEQ ID NO: 36334 - RNA, 20 nt, Artificial Sequence
  HTT spacer sequence TTCN PAM
gggcuuucuguuuugccuga

SEQ ID NO: 36335 - RNA, 20 nt, Artificial Sequence
  HTT spacer sequence TTCN PAM
guuuugccugaugauuuugc

SEQ ID NO: 36336 - RNA, 20 nt, Artificial Sequence
  HTT spacer sequence TTCN PAM
uuauuuaagcuccagcaaaa

SEQ ID NO: 36337 - RNA, 20 nt, Artificial Sequence
  HTT spacer sequence TTCN PAM
acaggcugggggcuugcaca

SEQ ID NO: 36338 - RNA, 20 nt, Artificial Sequence
  HTT spacer sequence TTCN PAM
uaaaaccacacuagcuccuu

SEQ ID NO: 36339 - RNA, 20 nt, Artificial Sequence
  HTT spacer sequence TTCN PAM
uugagcuuuuugaacugauc

SEQ ID NO: 36340 - RNA, 20 nt, Artificial Sequence
  HTT spacer sequence TTCN PAM
aaaagcucaaagaaagauuu

SEQ ID NO: 36341 - RNA, 20 nt, Artificial Sequence
  HTT spacer sequence TTCN PAM
agcauugcccuauugacccc

SEQ ID NO: 36342 - RNA, 20 nt, Artificial Sequence
  HTT spacer sequence TTCN PAM
agcaaaggagucagggaggg

SEQ ID NO: 36343 - RNA, 20 nt, Artificial Sequence
  HTT spacer sequence TTCN PAM
aaagccuacagauuccagca

SEQ ID NO: 36344 - RNA, 20 nt, Artificial Sequence
  HTT spacer sequence TTCN PAM
cacaucugggaguuugcaag

SEQ ID NO: 36345 - RNA, 20 nt, Artificial Sequence
  HTT spacer sequence TTCN PAM
acucagcgugugugcagaag

SEQ ID NO: 36346 - RNA, 20 nt, Artificial Sequence
  HTT spacer sequence TTCN PAM
gcacacacgcugagucgaaa

SEQ ID NO: 36347 - RNA, 20 nt, Artificial Sequence
  HTT spacer sequence TTCN PAM
gauucacacagccaaaguau

SEQ ID NO: 36348 - RNA, 20 nt, Artificial Sequence
  HTT spacer sequence TTCN PAM
cacagccaaaguauagauua

SEQ ID NO: 36349 - RNA, 20 nt, Artificial Sequence
  HTT spacer sequence TTCN PAM
uggacuuggagggucuuugg

SEQ ID NO: 36350 - RNA, 20 nt, Artificial Sequence
  HTT spacer sequence TTCN PAM
guccaaagacccuccaaguc

SEQ ID NO: 36351 - RNA, 20 nt, Artificial Sequence
  HTT spacer sequence TTCN PAM
cagcacaaaguacugggugu

SEQ ID NO: 36352 - RNA, 20 nt, Artificial Sequence
  HTT spacer sequence TTCN PAM
guggcaugcacgcaugggua

SEQ ID NO: 36353 - RNA, 20 nt, Artificial Sequence
  HTT spacer sequence TTCN PAM
ugugugugcaugucucaggg

SEQ ID NO: 36354 - RNA, 20 nt, Artificial Sequence
  HTT spacer sequence TTCN PAM
cugaggggucagagggugcc

SEQ ID NO: 36355 - RNA, 20 nt, Artificial Sequence
  HTT spacer sequence TTCN PAM
uaugugcucaugacauugag

SEQ ID NO: 36356 - RNA, 20 nt, Artificial Sequence
  HTT spacer sequence TTCN PAM
uuggcacacaggcacacucu

SEQ ID NO: 36357 - RNA, 20 nt, Artificial Sequence
  HTT spacer sequence TTCN PAM
uauauuuuuuuauauguggu

SEQ ID NO: 36358 - RNA, 20 nt, Artificial Sequence
  HTT spacer sequence TTCN PAM
cccaagucuuauuuuggucu

SEQ ID NO: 36359 - RNA, 20 nt, Artificial Sequence
  HTT spacer sequence TTCN PAM
acauaauacauuuagucaaa

SEQ ID NO: 36360 - RNA, 20 nt, Artificial Sequence
  HTT spacer sequence TTCN PAM
gaugaaucaaguagauuauu

SEQ ID NO: 36361 - RNA, 20 nt, Artificial Sequence
  HTT spacer sequence TTCN PAM
ucugaaaagacaauaaagac

SEQ ID NO: 36362 - RNA, 20 nt, Artificial Sequence
  HTT spacer sequence TTCN PAM
ugagaccaggaauguugcug

SEQ ID NO: 36363 - RNA, 20 nt, Artificial Sequence
  HTT spacer sequence TTCN PAM
uggucucaagaauaaucuac

SEQ ID NO: 36364 - RNA, 20 nt, Artificial Sequence
  HTT spacer sequence TTCN PAM
aaauaaccaaaacagcaaca

SEQ ID NO: 36365 - RNA, 20 nt, Artificial Sequence
  HTT spacer sequence TTCN PAM
aauugacuuuugaauuugag

SEQ ID NO: 36366 - RNA, 20 nt, Artificial Sequence
  HTT spacer sequence TTCN PAM
aaagucaauuugaaaaugau

SEQ ID NO: 36367 - RNA, 20 nt, Artificial Sequence
  HTT spacer sequence TTCN PAM
gaagugguguuaaauuauag

SEQ ID NO: 36368 - RNA, 20 nt, Artificial Sequence
  HTT spacer sequence TTCN PAM
gaaaaaaggugacucaaauu

SEQ ID NO: 36369 - RNA, 20 nt, Artificial Sequence
  HTT spacer sequence TTCN PAM
uuuuuuagaagucaucacaa

SEQ ID NO: 36370 - RNA, 20 nt, Artificial Sequence
  HTT spacer sequence TTCN PAM
aaaaaaagaaaaaaaaccua

SEQ ID NO: 36371 - RNA, 20 nt, Artificial Sequence
  HTT spacer sequence TTCN PAM
gaggaagagcuuugaccuuc

SEQ ID NO: 36372 - RNA, 20 nt, Artificial Sequence
  HTT spacer sequence TTCN PAM
ucugaacacugaucauuuug

SEQ ID NO: 36373 - RNA, 20 nt, Artificial Sequence
  HTT spacer sequence TTCN PAM
acaugguauaaugauugaua

SEQ ID NO: 36374 - RNA, 20 nt, Artificial Sequence
  HTT spacer sequence TTCN PAM
ucucuuaccauaaaccaagu

SEQ ID NO: 36375 - RNA, 20 nt, Artificial Sequence
  HTT spacer sequence TTCN PAM
uuauuucuugaaagcauuuu

SEQ ID NO: 36376 - RNA, 20 nt, Artificial Sequence
  HTT spacer sequence TTCN PAM
ugaaagcauuuuguagaugu

SEQ ID NO: 36377 - RNA, 20 nt, Artificial Sequence
  HTT spacer sequence TTCN PAM
agaaauaaagaaaacccuua

SEQ ID NO: 36378 - RNA, 20 nt, Artificial Sequence
  HTT spacer sequence TTCN PAM
aaauguaauuuccaugaaau

SEQ ID NO: 36379 - RNA, 20 nt, Artificial Sequence
  HTT spacer sequence TTCN PAM
augaaaugccugauaagggu

SEQ ID NO: 36380 - RNA, 20 nt, Artificial Sequence
  HTT spacer sequence TTCN PAM
uggaaauuacauuuggaaaa

SEQ ID NO: 36381 - RNA, 20 nt, Artificial Sequence
  HTT spacer sequence TTCN PAM
ucuuaauacaaagaggucgu

SEQ ID NO: 36382 - RNA, 20 nt, Artificial Sequence
  HTT spacer sequence TTCN PAM
ugcaucagcuuuauuuguuc

SEQ ID NO: 36383 - RNA, 20 nt, Artificial Sequence
  HTT spacer sequence TTCN PAM
agcucuuuuccugcaucagc

SEQ ID NO: 36384 - RNA, 20 nt, Artificial Sequence
  HTT spacer sequence TTCN PAM
ucuuaccugaugguacugga

SEQ ID NO: 36385 - RNA, 20 nt, Artificial Sequence
  HTT spacer sequence TTCN PAM
aacauacauuccucuuaccu

SEQ ID NO: 36386 - RNA, 20 nt, Artificial Sequence
  HTT spacer sequence TTCN PAM
aucugcacgggucaauaaag

SEQ ID NO: 36387 - RNA, 20 nt, Artificial Sequence
  HTT spacer sequence TTCN PAM
uuccaucugcacgggucaau

SEQ ID NO: 36388 - RNA, 20 nt, Artificial Sequence
  HTT spacer sequence TTCN PAM
aaguaacacaguuaacagug

SEQ ID NO: 36389 - RNA, 20 nt, Artificial Sequence
  HTT spacer sequence TTCN PAM
ggggccuggguagaugccgg

SEQ ID NO: 36390 - RNA, 20 nt, Artificial Sequence
  HTT spacer sequence TTCN PAM
ccugccuccaccucccgagu

SEQ ID NO: 36391 - RNA, 20 nt, Artificial Sequence
  HTT spacer sequence TTCN PAM
ccaugauggccaagcuguuu

SEQ ID NO: 36392 - RNA, 20 nt, Artificial Sequence
  HTT spacer sequence TTCN PAM
aacuccugaccucaagugau

SEQ ID NO: 36393 - RNA, 20 nt, Artificial Sequence
  HTT spacer sequence TTCN PAM
aaacagcuuggccaucaugg

SEQ ID NO: 36394 - RNA, 20 nt, Artificial Sequence
  HTT spacer sequence TTCN PAM
ccugacuccuggucugagag

SEQ ID NO: 36395 - RNA, 20 nt, Artificial Sequence
  HTT spacer sequence TTCN PAM
agauagugaggcccucuuuu

SEQ ID NO: 36396 - RNA, 20 nt, Artificial Sequence
  HTT spacer sequence TTCN PAM
aaaacgaggaccaaaaauca

SEQ ID NO: 36397 - RNA, 20 nt, Artificial Sequence
  HTT spacer sequence TTCN PAM
accaucuugaccaacacugu

SEQ ID NO: 36398 - RNA, 20 nt, Artificial Sequence
  HTT spacer sequence TTCN PAM
aucauuuuaagguuucuacc

SEQ ID NO: 36399 - RNA, 20 nt, Artificial Sequence
  HTT spacer sequence TTCN PAM
gaguugagauuucuaucauu

SEQ ID NO: 36400 - RNA, 20 nt, Artificial Sequence
  HTT spacer sequence TTCN PAM
uugagcugauuucugguuuu

SEQ ID NO: 36401 - RNA, 20 nt, Artificial Sequence
  HTT spacer sequence TTCN PAM
gguuuuguuuucuuaaagug

SEQ ID NO: 36402 - RNA, 20 nt, Artificial Sequence
  HTT spacer sequence TTCN PAM
uaaaguggcauaagaauuca

SEQ ID NO: 36403 - RNA, 20 nt, Artificial Sequence
  HTT spacer sequence TTCN PAM
uaugccacuuuaagaaaaca

SEQ ID NO: 36404 - RNA, 20 nt, Artificial Sequence
  HTT spacer sequence TTCN PAM
aagacauuuugaggaaggcu

SEQ ID NO: 36405 - RNA, 20 nt, Artificial Sequence
  HTT spacer sequence TTCN PAM
ucaaaaugucuuugaauucu

SEQ ID NO: 36406 - RNA, 20 nt, Artificial Sequence
  HTT spacer sequence TTCN PAM
gcacucagccuuccucaaaa

SEQ ID NO: 36407 - RNA, 20 nt, Artificial Sequence
  HTT spacer sequence TTCN PAM
ccuuucuuuuaacuugcacu

SEQ ID NO: 36408 - RNA, 20 nt, Artificial Sequence
  HTT spacer sequence TTCN PAM
uuuaacuugcacuguugucu

SEQ ID NO: 36409 - RNA, 20 nt, Artificial Sequence
  HTT spacer sequence TTCN PAM
uuuuagcuguuugucuuuga

SEQ ID NO: 36410 - RNA, 20 nt, Artificial Sequence
  HTT spacer sequence TTCN PAM
aagacaaacagcuaaaaaga

SEQ ID NO: 36411 - RNA, 20 nt, Artificial Sequence
  HTT spacer sequence TTCN PAM
uaaagccauagcuuuucuca

SEQ ID NO: 36412 - RNA, 20 nt, Artificial Sequence
  HTT spacer sequence TTCN PAM
cauaagaagcagcacuuucu

SEQ ID NO: 36413 - RNA, 20 nt, Artificial Sequence
  HTT spacer sequence TTCN PAM
uaugagaaaagcuauggcuu

SEQ ID NO: 36414 - RNA, 20 nt, Artificial Sequence
  HTT spacer sequence TTCN PAM
uuguucauucauauuuuaau

SEQ ID NO: 36415 - RNA, 20 nt, Artificial Sequence
  HTT spacer sequence TTCN PAM
uucauauuuuaaugaacccc

SEQ ID NO: 36416 - RNA, 20 nt, Artificial Sequence
  HTT spacer sequence TTCN PAM
uauuuuaaugaaccccugua

SEQ ID NO: 36417 - RNA, 20 nt, Artificial Sequence
  HTT spacer sequence TTCN PAM
uuaaaauaugaaugaacaaa

SEQ ID NO: 36418 - RNA, 20 nt, Artificial Sequence
  HTT spacer sequence TTCN PAM
gaccucuuuaugauacaugu

SEQ ID NO: 36419 - RNA, 20 nt, Artificial Sequence
  HTT spacer sequence TTCN PAM
ucagccacauguucagugag

SEQ ID NO: 36420 - RNA, 20 nt, Artificial Sequence
  HTT spacer sequence TTCN PAM
gugagcucuggauaugucug

SEQ ID NO: 36421 - RNA, 20 nt, Artificial Sequence
  HTT spacer sequence TTCN PAM
aaacagacauauccagagcu

SEQ ID NO: 36422 - RNA, 20 nt, Artificial Sequence
  HTT spacer sequence TTCN PAM
cagagguauacaugguugag

SEQ ID NO: 36423 - RNA, 20 nt, Artificial Sequence
  HTT spacer sequence TTCN PAM
guagauugccucugcagaga

SEQ ID NO: 36424 - RNA, 20 nt, Artificial Sequence
  HTT spacer sequence TTCN PAM
cugcagaggcaaucuacuga

SEQ ID NO: 36425 - RNA, 20 nt, Artificial Sequence
  HTT spacer sequence TTCN PAM
guguucucugcagaggcaau

SEQ ID NO: 36426 - RNA, 20 nt, Artificial Sequence
  HTT spacer sequence TTCN PAM
auucuguguucucugcagag

SEQ ID NO: 36427 - RNA, 20 nt, Artificial Sequence
  HTT spacer sequence TTCN PAM
cuucaauucuguguucucug

SEQ ID NO: 36428 - RNA, 20 nt, Artificial Sequence
  HTT spacer sequence TTCN PAM
gcagguggcucauugccuuu

SEQ ID NO: 36429 - RNA, 20 nt, Artificial Sequence
  HTT spacer sequence TTCN PAM
aacacagccuugacuaaacu

SEQ ID NO: 36430 - RNA, 20 nt, Artificial Sequence
  HTT spacer sequence TTCN PAM
uguugugccuuuucucugau

SEQ ID NO: 36431 - RNA, 20 nt, Artificial Sequence
  HTT spacer sequence TTCN PAM
cugauugugaaauauuacaa

SEQ ID NO: 36432 - RNA, 20 nt, Artificial Sequence
  HTT spacer sequence TTCN PAM
caaucagagaaaaggcacaa

SEQ ID NO: 36433 - RNA, 20 nt, Artificial Sequence
  HTT spacer sequence TTCN PAM
auacaaauaacaaugauggc

SEQ ID NO: 36434 - RNA, 20 nt, Artificial Sequence
  HTT spacer sequence TTCN PAM
ucuagggcacauacaaggug

SEQ ID NO: 36435 - RNA, 20 nt, Artificial Sequence
  HTT spacer sequence TTCN PAM
uucugauuccccuacauuuc

SEQ ID NO: 36436 - RNA, 20 nt, Artificial Sequence
  HTT spacer sequence TTCN PAM
gauuccccuacauuucucau

SEQ ID NO: 36437 - RNA, 20 nt, Artificial Sequence
  HTT spacer sequence TTCN PAM
ccuacauuucucaugucaua

SEQ ID NO: 36438 - RNA, 20 nt, Artificial Sequence
  HTT spacer sequence TTCN PAM
caugucauagaguggggguu

SEQ ID NO: 36439 - RNA, 20 nt, Artificial Sequence
  HTT spacer sequence TTCN PAM
agcugaacugggacaaguau

SEQ ID NO: 36440 - RNA, 20 nt, Artificial Sequence
  HTT spacer sequence TTCN PAM
gcuggaagacucuaggaucc

SEQ ID NO: 36441 - RNA, 20 nt, Artificial Sequence
  HTT spacer sequence TTCN PAM
accccuacguguccgucugu

SEQ ID NO: 36442 - RNA, 20 nt, Artificial Sequence
  HTT spacer sequence TTCN PAM
aauugugcacgcucuuauag

SEQ ID NO: 36443 - RNA, 20 nt, Artificial Sequence
  HTT spacer sequence TTCN PAM
uucuuguccugcagcagugc

SEQ ID NO: 36444 - RNA, 20 nt, Artificial Sequence
  HTT spacer sequence TTCN PAM
uguccugcagcagugccaca

SEQ ID NO: 36445 - RNA, 20 nt, Artificial Sequence
  HTT spacer sequence TTCN PAM
ccuuguggcacugcugcagg

SEQ ID NO: 36446 - RNA, 20 nt, Artificial Sequence
  HTT spacer sequence TTCN PAM
uucuccuuguggcacugcug

SEQ ID NO: 36447 - RNA, 20 nt, Artificial Sequence
  HTT spacer sequence TTCN PAM
acuugucuucauucuccuug

SEQ ID NO: 36448 - RNA, 20 nt, Artificial Sequence
  HTT spacer sequence TTCN PAM
caaggaccuuaagcuaccau

SEQ ID NO: 36449 - RNA, 20 nt, Artificial Sequence
  HTT spacer sequence TTCN PAM
agccacccaccuuucacaag

SEQ ID NO: 36450 - RNA, 20 nt, Artificial Sequence
  HTT spacer sequence TTCN PAM
uucaguccuaaucugugccu

SEQ ID NO: 36451 - RNA, 20 nt, Artificial Sequence
  HTT spacer sequence TTCN PAM
guccuaaucugugccuugau

SEQ ID NO: 36452 - RNA, 20 nt, Artificial Sequence
  HTT spacer sequence TTCN PAM
ccgugcuagucaugggacag

SEQ ID NO: 36453 - RNA, 20 nt, Artificial Sequence
  HTT spacer sequence TTCN PAM
uuucuucucacaaugccauc

SEQ ID NO: 36454 - RNA, 20 nt, Artificial Sequence
  HTT spacer sequence TTCN PAM
ucucacaaugccaucucagg

SEQ ID NO: 36455 - RNA, 20 nt, Artificial Sequence
  HTT spacer sequence TTCN PAM
cacaaugccaucucagguug

SEQ ID NO: 36456 - RNA, 20 nt, Artificial Sequence
  HTT spacer sequence TTCN PAM
ggcuuuagaguuagccuugg

SEQ ID NO: 36457 - RNA, 20 nt, Artificial Sequence
  HTT spacer sequence TTCN PAM
ggucaacccaguguuuuauu

SEQ ID NO: 36458 - RNA, 20 nt, Artificial Sequence
  HTT spacer sequence TTCN PAM
uuuccuuucccuuccuuucc

SEQ ID NO: 36459 - RNA, 20 nt, Artificial Sequence
  HTT spacer sequence TTCN PAM
uuucccuuccuuuccuuucc

SEQ ID NO: 36460 - RNA, 20 nt, Artificial Sequence
  HTT spacer sequence TTCN PAM
cuuccuuuccuuuccgacag

SEQ ID NO: 36461 - RNA, 20 nt, Artificial Sequence
  HTT spacer sequence TTCN PAM
uuuccuuuccgacagggucu

SEQ ID NO: 36462 - RNA, 20 nt, Artificial Sequence
  HTT spacer sequence TTCN PAM
uuuccgacagggucucacuc

SEQ ID NO: 36463 - RNA, 20 nt, Artificial Sequence
  HTT spacer sequence TTCN PAM
gacagggucucacucuguca

SEQ ID NO: 36464 - RNA, 20 nt, Artificial Sequence
  HTT spacer sequence TTCN PAM
accaauucucccaccucagc

SEQ ID NO: 36465 - RNA, 20 nt, Artificial Sequence
  HTT spacer sequence TTCN PAM
cccaccucagccuccugagu

SEQ ID NO: 36466 - RNA, 20 nt, Artificial Sequence
  HTT spacer sequence TTCN PAM
ucacuaaucagaauuucuau

SEQ ID NO: 36467 - RNA, 20 nt, Artificial Sequence
  HTT spacer sequence TTCN PAM
gauuagugaugaauaggcca

SEQ ID NO: 36468 - RNA, 20 nt, Artificial Sequence
  HTT spacer sequence TTCN PAM
augaucaaaugacaugaauc

SEQ ID NO: 36469 - RNA, 20 nt, Artificial Sequence
  HTT spacer sequence TTCN PAM
ugucauuugaucauagaaau

SEQ ID NO: 36470 - RNA, 20 nt, Artificial Sequence
  HTT spacer sequence TTCN PAM
acaacugcaguggaaggaaa

SEQ ID NO: 36471 - RNA, 20 nt, Artificial Sequence
  HTT spacer sequence TTCN PAM
acugcaguuguggaaacaau

SEQ ID NO: 36472 - RNA, 20 nt, Artificial Sequence
  HTT spacer sequence TTCN PAM
uuccacugcaguuguggaaa

SEQ ID NO: 36473 - RNA, 20 nt, Artificial Sequence
  HTT spacer sequence TTCN PAM
gaagcagccugcccccaguc

SEQ ID NO: 36474 - RNA, 20 nt, Artificial Sequence
  HTT spacer sequence TTCN PAM
gaaacuggcacugccaggcc

SEQ ID NO: 36475 - RNA, 20 nt, Artificial Sequence
  HTT spacer sequence TTCN PAM
cugugagcuacagaggugcu

SEQ ID NO: 36476 - RNA, 20 nt, Artificial Sequence
  HTT spacer sequence TTCN PAM
ggcagagcugccucaaggag

SEQ ID NO: 36477 - RNA, 20 nt, Artificial Sequence
  HTT spacer sequence TTCN PAM
ucuugauuauacacaauaaa

SEQ ID NO: 36478 - RNA, 20 nt, Artificial Sequence
  HTT spacer sequence TTCN PAM
ugacugcacccccauucuga

SEQ ID NO: 36479 - RNA, 20 nt, Artificial Sequence
  HTT spacer sequence TTCN PAM
gauuucauaauggaauguua

SEQ ID NO: 36480 - RNA, 20 nt, Artificial Sequence
  HTT spacer sequence TTCN PAM
uaauggaauguuaucuugag

SEQ ID NO: 36481 - RNA, 20 nt, Artificial Sequence
  HTT spacer sequence TTCN PAM
auuaugaaaucagaaugggg

SEQ ID NO: 36482 - RNA, 20 nt, Artificial Sequence
  HTT spacer sequence TTCN PAM
ggugagauugacagcaguuu

SEQ ID NO: 36483 - RNA, 20 nt, Artificial Sequence
  HTT spacer sequence TTCN PAM
aaaaccaucuguaggcaggg

SEQ ID NO: 36484 - RNA, 20 nt, Artificial Sequence
  HTT spacer sequence TTCN PAM
agggcaccauucuaaaacca

SEQ ID NO: 36485 - RNA, 20 nt, Artificial Sequence
  HTT spacer sequence TTCN PAM
uuucugugcguaaucugagu

SEQ ID NO: 36486 - RNA, 20 nt, Artificial Sequence
  HTT spacer sequence TTCN PAM
gugcguaaucugaguagagu

SEQ ID NO: 36487 - RNA, 20 nt, Artificial Sequence
  HTT spacer sequence TTCN PAM
aucuccacucuacucagauu

SEQ ID NO: 36488 - RNA, 20 nt, Artificial Sequence
  HTT spacer sequence TTCN PAM
ggccuucgaucuccacucua

SEQ ID NO: 36489 - RNA, 20 nt, Artificial Sequence
  HTT spacer sequence TTCN PAM
auugcggcagauauuaaguc

SEQ ID NO: 36490 - RNA, 20 nt, Artificial Sequence
  HTT spacer sequence TTCN PAM
uaaauguuguaucacacaau

SEQ ID NO: 36491 - RNA, 20 nt, Artificial Sequence
  HTT spacer sequence TTCN PAM
gaaguagugcuagauacuau

SEQ ID NO: 36492 - RNA, 20 nt, Artificial Sequence
  HTT spacer sequence TTCN PAM
gaaugcaacaugcaccugug

SEQ ID NO: 36493 - RNA, 20 nt, Artificial Sequence
  HTT spacer sequence TTCN PAM
uuaaucugcuuugaucacug

SEQ ID NO: 36494 - RNA, 20 nt, Artificial Sequence
  HTT spacer sequence TTCN PAM
uggagugaagauuuuguugg

SEQ ID NO: 36495 - RNA, 20 nt, Artificial Sequence
  HTT spacer sequence TTCN PAM
cuccaagaaggcaggggguc

SEQ ID NO: 36496 - RNA, 20 nt, Artificial Sequence
  HTT spacer sequence TTCN PAM
auugucuguccccuuacccg

SEQ ID NO: 36497 - RNA, 20 nt, Artificial Sequence
  HTT spacer sequence TTCN PAM
cucacuugcuuuucuauugu

SEQ ID NO: 36498 - RNA, 20 nt, Artificial Sequence
  HTT spacer sequence TTCN PAM
ugaucagccgccaugguaua

SEQ ID NO: 36499 - RNA, 20 nt, Artificial Sequence
  HTT spacer sequence TTCN PAM
guacgguguuccugaucagc

SEQ ID NO: 36500 - RNA, 20 nt, Artificial Sequence
  HTT spacer sequence TTCN PAM
ucuguacgguguuccugauc

SEQ ID NO: 36501 - RNA, 20 nt, Artificial Sequence
  HTT spacer sequence TTCN PAM
cuccuggauucuucuguacg

SEQ ID NO: 36502 - RNA, 20 nt, Artificial Sequence
  HTT spacer sequence TTCN PAM
gcuggugaugagaagaagcu

SEQ ID NO: 36503 - RNA, 20 nt, Artificial Sequence
  HTT spacer sequence TTCN PAM
caucaccagcugaacaaugc

SEQ ID NO: 36504 - RNA, 20 nt, Artificial Sequence
  HTT spacer sequence TTCN PAM
ucucaucaccagcugaacaa

SEQ ID NO: 36505 - RNA, 20 nt, Artificial Sequence
  HTT spacer sequence TTCN PAM
cucaaaugucaccagaucac

SEQ ID NO: 36506 - RNA, 20 nt, Artificial Sequence
  HTT spacer sequence TTCN PAM
gcaaauucacucaaauguca

SEQ ID NO: 36507 - RNA, 20 nt, Artificial Sequence
  HTT spacer sequence TTCN PAM
uuucugcaaauucacucaaa

SEQ ID NO: 36508 - RNA, 20 nt, Artificial Sequence
  HTT spacer sequence TTCN PAM
ccagguaucuccuaggcuug

SEQ ID NO: 36509 - RNA, 20 nt, Artificial Sequence
  HTT spacer sequence TTCN PAM
uuccccagguaucuccuagg

SEQ ID NO: 36510 - RNA, 20 nt, Artificial Sequence
  HTT spacer sequence TTCN PAM
aggcagagcaaauagcagug

SEQ ID NO: 36511 - RNA, 20 nt, Artificial Sequence
  HTT spacer sequence TTCN PAM
cuccccauggcugccccacu

SEQ ID NO: 36512 - RNA, 20 nt, Artificial Sequence
  HTT spacer sequence TTCN PAM
uauuccugaguugagaauag

SEQ ID NO: 36513 - RNA, 20 nt, Artificial Sequence
  HTT spacer sequence TTCN PAM
ugaguugagaauagccuuga

SEQ ID NO: 36514 - RNA, 20 nt, Artificial Sequence
  HTT spacer sequence TTCN PAM
caacucaggaauaagaauga

SEQ ID NO: 36515 - RNA, 20 nt, Artificial Sequence
  HTT spacer sequence TTCN PAM
acuccagugccgggucucac

SEQ ID NO: 36516 - RNA, 20 nt, Artificial Sequence
  HTT spacer sequence TTCN PAM
ugcugccaagggaugcugac

SEQ ID NO: 36517 - RNA, 20 nt, Artificial Sequence
  HTT spacer sequence TTCN PAM
gggugaggacaggguggcug

SEQ ID NO: 36518 - RNA, 20 nt, Artificial Sequence
  HTT spacer sequence TTCN PAM
agcuccuccuccucuccagc

SEQ ID NO: 36519 - RNA, 20 nt, Artificial Sequence
  HTT spacer sequence TTCN PAM
uaaagccaagauuuuuuuua

SEQ ID NO: 36520 - RNA, 20 nt, Artificial Sequence
  HTT spacer sequence TTCN PAM
caaggugcugacagcagaug

SEQ ID NO: 36521 - RNA, 20 nt, Artificial Sequence
  HTT spacer sequence TTCN PAM
cauuaggguuuggcucccuu

SEQ ID NO: 36522 - RNA, 20 nt, Artificial Sequence
  HTT spacer sequence TTCN PAM
ugaaaggacaggagagagac

SEQ ID NO: 36523 - RNA, 20 nt, Artificial Sequence
  HTT spacer sequence TTCN PAM
ggaacacauucccauuaggg

SEQ ID NO: 36524 - RNA, 20 nt, Artificial Sequence
  HTT spacer sequence TTCN PAM
caagucucucuccuguccuu

SEQ ID NO: 36525 - RNA, 20 nt, Artificial Sequence
  HTT spacer sequence TTCN PAM
aguaaaaccuuuucccaagu

SEQ ID NO: 36526 - RNA, 20 nt, Artificial Sequence
  HTT spacer sequence TTCN PAM
cucuucaaguaaaaccuuuu

SEQ ID NO: 36527 - RNA, 20 nt, Artificial Sequence
  HTT spacer sequence TTCN PAM
ccguucccucuucaaguaaa

SEQ ID NO: 36528 - RNA, 20 nt, Artificial Sequence
  HTT spacer sequence TTCN PAM
gccaacuuaacccauugccg

SEQ ID NO: 36529 - RNA, 20 nt, Artificial Sequence
  HTT spacer sequence TTCN PAM
uuucugccaacuuaacccau

SEQ ID NO: 36530 - RNA, 20 nt, Artificial Sequence
  HTT spacer sequence TTCN PAM
gcccucagugcguaaacagg

SEQ ID NO: 36531 - RNA, 20 nt, Artificial Sequence
  HTT spacer sequence TTCN PAM
ugacacaggagacacaaauc

SEQ ID NO: 36532 - RNA, 20 nt, Artificial Sequence
  HTT spacer sequence TTCN PAM
cagacauggguuaggauugg

SEQ ID NO: 36533 - RNA, 20 nt, Artificial Sequence
  HTT spacer sequence TTCN PAM
cccagaguugcuggggagga

SEQ ID NO: 36534 - RNA, 20 nt, Artificial Sequence
  HTT spacer sequence TTCN PAM
ugcauccuggacccucgccu

SEQ ID NO: 36535 - RNA, 20 nt, Artificial Sequence
  HTT spacer sequence TTCN PAM
cuuguuguaagauguggcca

SEQ ID NO: 36536 - RNA, 20 nt, Artificial Sequence
  HTT spacer sequence TTCN PAM
caucugugccuugaaaaaca

SEQ ID NO: 36537 - RNA, 20 nt, Artificial Sequence
  HTT spacer sequence TTCN PAM
aggcacagaugugaagcuca

SEQ ID NO: 36538 - RNA, 20 nt, Artificial Sequence
  HTT spacer sequence TTCN PAM
acugaguguguauacauagu

SEQ ID NO: 36539 - RNA, 20 nt, Artificial Sequence
  HTT spacer sequence TTCN PAM
aauuuuuguuucuacugagu

SEQ ID NO: 36540 - RNA, 20 nt, Artificial Sequence
  HTT spacer sequence TTCN PAM
accauuacuuauugauggug

SEQ ID NO: 36541 - RNA, 20 nt, Artificial Sequence
  HTT spacer sequence TTCN PAM
ggccaggugugguggcucau

SEQ ID NO: 36542 - RNA, 20 nt, Artificial Sequence
  HTT spacer sequence TTCN PAM
ccauguugcccaggcugguc

SEQ ID NO: 36543 - RNA, 20 nt, Artificial Sequence
  HTT spacer sequence TTCN PAM
aguagagacaggguuucacc

SEQ ID NO: 36544 - RNA, 20 nt, Artificial Sequence
  HTT spacer sequence TTCN PAM
ugcgccacugcacuccuggg

SEQ ID NO: 36545 - RNA, 20 nt, Artificial Sequence
  HTT spacer sequence TTCN PAM
aacagagucucacucugugc

SEQ ID NO: 36546 - RNA, 20 nt, Artificial Sequence
  HTT spacer sequence TTCN PAM
cucucucucuuucuaacaga

SEQ ID NO: 36547 - RNA, 20 nt, Artificial Sequence
  HTT spacer sequence TTCN PAM
uucucucucucucuuucuaa

SEQ ID NO: 36548 - RNA, 20 nt, Artificial Sequence
  HTT spacer sequence TTCN PAM
ucccucccucucucuucuuu

SEQ ID NO: 36549 - RNA, 20 nt, Artificial Sequence
  HTT spacer sequence TTCN PAM
uuccucccucccucucucuu

SEQ ID NO: 36550 - RNA, 20 nt, Artificial Sequence
  HTT spacer sequence TTCN PAM
uuccuuccucccucccucuc

SEQ ID NO: 36551 - RNA, 20 nt, Artificial Sequence
  HTT spacer sequence TTCN PAM
uuccuuccuuccucccuccc

SEQ ID NO: 36552 - RNA, 20 nt, Artificial Sequence
  HTT spacer sequence TTCN PAM
auuuauuuccuuccuuccuu

SEQ ID NO: 36553 - RNA, 20 nt, Artificial Sequence
  HTT spacer sequence TTCN PAM
uccauuuauuuccuuccuuc

SEQ ID NO: 36554 - RNA, 20 nt, Artificial Sequence
  HTT spacer sequence TTCN PAM
auuucuuccauuuauuuccu

SEQ ID NO: 36555 - RNA, 20 nt, Artificial Sequence
  HTT spacer sequence TTCN PAM
ucccuuccauuucuuccauu

SEQ ID NO: 36556 - RNA, 20 nt, Artificial Sequence
  HTT spacer sequence TTCN PAM
ucccuccccuuccucccuuc

SEQ ID NO: 36557 - RNA, 20 nt, Artificial Sequence
  HTT spacer sequence TTCN PAM
uuccucccuccccuuccucc

SEQ ID NO: 36558 - RNA, 20 nt, Artificial Sequence
  HTT spacer sequence TTCN PAM
uccuuccucccuccccuucc

SEQ ID NO: 36559 - RNA, 20 nt, Artificial Sequence
  HTT spacer sequence TTCN PAM
uuucuuccuuccucccuccc

SEQ ID NO: 36560 - RNA, 20 nt, Artificial Sequence
  HTT spacer sequence TTCN PAM
gccaguugccuugggaguuc

SEQ ID NO: 36561 - RNA, 20 nt, Artificial Sequence
  HTT spacer sequence TTCN PAM
ccauugcacuggguuaagug

SEQ ID NO: 36562 - RNA, 20 nt, Artificial Sequence
  HTT spacer sequence TTCN PAM
cacuuaacccagugcaaugg

SEQ ID NO: 36563 - RNA, 20 nt, Artificial Sequence
  HTT spacer sequence TTCN PAM
aaacaacuaaaacaaaaccu

SEQ ID NO: 36564 - RNA, 20 nt, Artificial Sequence
  HTT spacer sequence TTCN PAM
uauagccauauccuugcccc

SEQ ID NO: 36565 - RNA, 20 nt, Artificial Sequence
  HTT spacer sequence TTCN PAM
uaaucugccccauguuccua

SEQ ID NO: 36566 - RNA, 20 nt, Artificial Sequence
  HTT spacer sequence TTCN PAM
gcacuccaucccucccacaa

SEQ ID NO: 36567 - RNA, 20 nt, Artificial Sequence
  HTT spacer sequence TTCN PAM
uuuucugcacuccaucccuc

SEQ ID NO: 36568 - RNA, 20 nt, Artificial Sequence
  HTT spacer sequence TTCN PAM
aagcgucccuuuguauacac

SEQ ID NO: 36569 - RNA, 20 nt, Artificial Sequence
  HTT spacer sequence TTCN PAM
cacuuuuguauauuugaguc

SEQ ID NO: 36570 - RNA, 20 nt, Artificial Sequence
  HTT spacer sequence TTCN PAM
guaaaagacucaaauauaca

SEQ ID NO: 36571 - RNA, 20 nt, Artificial Sequence
  HTT spacer sequence TTCN PAM
guuaugggaaaaauguagcu

SEQ ID NO: 36572 - RNA, 20 nt, Artificial Sequence
  HTT spacer sequence TTCN PAM
cauaacagaaaucuugucau

SEQ ID NO: 36573 - RNA, 20 nt, Artificial Sequence
  HTT spacer sequence TTCN PAM
ccacugaacuuaaaaugcuu

SEQ ID NO: 36574 - RNA, 20 nt, Artificial Sequence
  HTT spacer sequence TTCN PAM
guggugaaccaagcaaacau

SEQ ID NO: 36575 - RNA, 20 nt, Artificial Sequence
  HTT spacer sequence TTCN PAM
cucauuuaaaagcauuuuaa

SEQ ID NO: 36576 - RNA, 20 nt, Artificial Sequence
  HTT spacer sequence TTCN PAM
uguacaccagcuauguaacu

SEQ ID NO: 36577 - RNA, 20 nt, Artificial Sequence
  HTT spacer sequence TTCN PAM
uuuggcuuacguagaaaugu

SEQ ID NO: 36578 - RNA, 20 nt, Artificial Sequence
  HTT spacer sequence TTCN PAM
acguaagccaaaagaaacga

SEQ ID NO: 36579 - RNA, 20 nt, Artificial Sequence
  HTT spacer sequence TTCN PAM
acagaugcacauugacucuc

SEQ ID NO: 36580 - RNA, 20 nt, Artificial Sequence
  HTT spacer sequence TTCN PAM
ugagagucaaugugcaucug

SEQ ID NO: 36581 - RNA, 20 nt, Artificial Sequence
  HTT spacer sequence TTCN PAM
ucccuccguccgguagacau

SEQ ID NO: 36582 - RNA, 20 nt, Artificial Sequence
  HTT spacer sequence TTCN PAM
ucacuccaaacacaauggug

SEQ ID NO: 36583 - RNA, 20 nt, Artificial Sequence
  HTT spacer sequence TTCN PAM
ucugcugagccaggcgagag

SEQ ID NO: 36584 - RNA, 20 nt, Artificial Sequence
  HTT spacer sequence TTCN PAM
ggcucugauuacugggacca

SEQ ID NO: 36585 - RNA, 20 nt, Artificial Sequence
  HTT spacer sequence TTCN PAM
ggggguggucccaguaauca

SEQ ID NO: 36586 - RNA, 20 nt, Artificial Sequence
  HTT spacer sequence TTCN PAM
ugagaguuugcuuuuuuuuu

SEQ ID NO: 36587 - RNA, 20 nt, Artificial Sequence
  HTT spacer sequence TTCN PAM
gcaccacccccacaccaaaa

SEQ ID NO: 36588 - RNA, 20 nt, Artificial Sequence
  HTT spacer sequence TTCN PAM
agcuucacaccauucuccug

SEQ ID NO: 36589 - RNA, 20 nt, Artificial Sequence
  HTT spacer sequence TTCN PAM
caccauucuccugccucagc

SEQ ID NO: 36590 - RNA, 20 nt, Artificial Sequence
  HTT spacer sequence TTCN PAM
ccugccucagccucccgagu

SEQ ID NO: 36591 - RNA, 20 nt, Artificial Sequence
  HTT spacer sequence TTCN PAM
ccguguuagccaggaugguc

SEQ ID NO: 36592 - RNA, 20 nt, Artificial Sequence
  HTT spacer sequence TTCN PAM
agcaauuuuccugccucagc

SEQ ID NO: 36593 - RNA, 20 nt, Artificial Sequence
  HTT spacer sequence TTCN PAM
ugccucagccucccgaguag

SEQ ID NO: 36594 - RNA, 20 nt, Artificial Sequence
  HTT spacer sequence TTCN PAM
cuguguuagccaggaugguc

SEQ ID NO: 36595 - RNA, 20 nt, Artificial Sequence
  HTT spacer sequence TTCN PAM
caggugaaacuaaugccugc

SEQ ID NO: 36596 - RNA, 20 nt, Artificial Sequence
  HTT spacer sequence TTCN PAM
ccugggaauuugcuaaaaau

SEQ ID NO: 36597 - RNA, 20 nt, Artificial Sequence
  HTT spacer sequence TTCN PAM
gggagcacacuuugggacuc

SEQ ID NO: 36598 - RNA, 20 nt, Artificial Sequence
  HTT spacer sequence TTCN PAM
uucacaaaauuggcaauugg

SEQ ID NO: 36599 - RNA, 20 nt, Artificial Sequence
  HTT spacer sequence TTCN PAM
caaaauuggcaauuggggga

SEQ ID NO: 36600 - RNA, 20 nt, Artificial Sequence
  HTT spacer sequence TTCN PAM
cccaauugccaauuuuguga

SEQ ID NO: 36601 - RNA, 20 nt, Artificial Sequence
  HTT spacer sequence TTCN PAM
uuuuuucuucagcugugacu

SEQ ID NO: 36602 - RNA, 20 nt, Artificial Sequence
  HTT spacer sequence TTCN PAM
ucagcugugacuuauguauu

SEQ ID NO: 36603 - RNA, 20 nt, Artificial Sequence
  HTT spacer sequence TTCN PAM
gcugugacuuauguauuaug

SEQ ID NO: 36604 - RNA, 20 nt, Artificial Sequence
  HTT spacer sequence TTCN PAM
acuguggauaucgggaauuc

SEQ ID NO: 36605 - RNA, 20 nt, Artificial Sequence
  HTT spacer sequence TTCN PAM
cgauauccacaguugaacag

SEQ ID NO: 36606 - RNA, 20 nt, Artificial Sequence
  HTT spacer sequence TTCN PAM
ggccauuuugaggguucuga

SEQ ID NO: 36607 - RNA, 20 nt, Artificial Sequence
  HTT spacer sequence TTCN PAM
gauuucccagucaacugaag

SEQ ID NO: 36608 - RNA, 20 nt, Artificial Sequence
  HTT spacer sequence TTCN PAM
cagucaacugaagauauugu

SEQ ID NO: 36609 - RNA, 20 nt, Artificial Sequence
  HTT spacer sequence TTCN PAM
guugacugggaaaucagaac

SEQ ID NO: 36610 - RNA, 20 nt, Artificial Sequence
  HTT spacer sequence TTCN PAM
uucucguauucaggagcucu

SEQ ID NO: 36611 - RNA, 20 nt, Artificial Sequence
  HTT spacer sequence TTCN PAM
cguauucaggagcucuccuu

SEQ ID NO: 36612 - RNA, 20 nt, Artificial Sequence
  HTT spacer sequence TTCN PAM
ggagcucuccuucucuccgu

SEQ ID NO: 36613 - RNA, 20 nt, Artificial Sequence
  HTT spacer sequence TTCN PAM
cuccguauuuaaucuccugu

SEQ ID NO: 36614 - RNA, 20 nt, Artificial Sequence
  HTT spacer sequence TTCN PAM
acgcuagaagaacacaguga

SEQ ID NO: 36615 - RNA, 20 nt, Artificial Sequence
  HTT spacer sequence TTCN PAM
agcguugaaguacugucccc

SEQ ID NO: 36616 - RNA, 20 nt, Artificial Sequence
  HTT spacer sequence TTCN PAM
ucuagcguugaaguacuguc

SEQ ID NO: 36617 - RNA, 20 nt, Artificial Sequence
  HTT spacer sequence TTCN PAM
cuguguucuucuagcguuga

SEQ ID NO: 36618 - RNA, 20 nt, Artificial Sequence
  HTT spacer sequence TTCN PAM
cuucacuguguucuucuagc

SEQ ID NO: 36619 - RNA, 20 nt, Artificial Sequence
  HTT spacer sequence TTCN PAM
uuauuuguuucccuucacug

SEQ ID NO: 36620 - RNA, 20 nt, Artificial Sequence
  HTT spacer sequence TTCN PAM
ggcaaauucuuuauuuguuu

SEQ ID NO: 36621 - RNA, 20 nt, Artificial Sequence
  HTT spacer sequence TTCN PAM
ucuggcaaauucuuuauuug

SEQ ID NO: 36622 - RNA, 20 nt, Artificial Sequence
  HTT spacer sequence TTCN PAM
agguaugcuuucuaucugag

SEQ ID NO: 36623 - RNA, 20 nt, Artificial Sequence
  HTT spacer sequence TTCN PAM
aucugagccuauaacuaacc

SEQ ID NO: 36624 - RNA, 20 nt, Artificial Sequence
  HTT spacer sequence TTCN PAM
caaaaggcauggguuaguua

SEQ ID NO: 36625 - RNA, 20 nt, Artificial Sequence
  HTT spacer sequence TTCN PAM
cagucaguaagucuggaaua

SEQ ID NO: 36626 - RNA, 20 nt, Artificial Sequence
  HTT spacer sequence TTCN PAM
agacuuacugacugugaaac

SEQ ID NO: 36627 - RNA, 20 nt, Artificial Sequence
  HTT spacer sequence TTCN PAM
cuucugaguuggguaaagaa

SEQ ID NO: 36628 - RNA, 20 nt, Artificial Sequence
  HTT spacer sequence TTCN PAM
gaguuggguaaagaagucug

SEQ ID NO: 36629 - RNA, 20 nt, Artificial Sequence
  HTT spacer sequence TTCN PAM
uuacccaacucagaagugaa

SEQ ID NO: 36630 - RNA, 20 nt, Artificial Sequence
  HTT spacer sequence TTCN PAM
aauccguccugcauuaucua

SEQ ID NO: 36631 - RNA, 20 nt, Artificial Sequence
  HTT spacer sequence TTCN PAM
uaccugucuugaaguucugu

SEQ ID NO: 36632 - RNA, 20 nt, Artificial Sequence
  HTT spacer sequence TTCN PAM
agacagguaugaaccaagag

SEQ ID NO: 36633 - RNA, 20 nt, Artificial Sequence
  HTT spacer sequence TTCN PAM
gucauguucugucucuuguc

SEQ ID NO: 36634 - RNA, 20 nt, Artificial Sequence
  HTT spacer sequence TTCN PAM
gucucuuguccucaguagag

SEQ ID NO: 36635 - RNA, 20 nt, Artificial Sequence
  HTT spacer sequence TTCN PAM
cugacgucagcgugccccua

SEQ ID NO: 36636 - RNA, 20 nt, Artificial Sequence
  HTT spacer sequence TTCN PAM
acuucccugacgucagcgug

SEQ ID NO: 36637 - RNA, 20 nt, Artificial Sequence
  HTT spacer sequence TTCN PAM
cuuggguuucaacuucccug

SEQ ID NO: 36638 - RNA, 20 nt, Artificial Sequence
  HTT spacer sequence TTCN PAM
cccugcagggcagccugccu

SEQ ID NO: 36639 - RNA, 20 nt, Artificial Sequence
  HTT spacer sequence TTCN PAM
cucauaaauuguuuggaagc

SEQ ID NO: 36640 - RNA, 20 nt, Artificial Sequence
  HTT spacer sequence TTCN PAM
aaacaauuuaugagggaaga

SEQ ID NO: 36641 - RNA, 20 nt, Artificial Sequence
  HTT spacer sequence TTCN PAM
gagcauucacugaguuagag

SEQ ID NO: 36642 - RNA, 20 nt, Artificial Sequence
  HTT spacer sequence TTCN PAM
cugaguuagagcugcuucug

SEQ ID NO: 36643 - RNA, 20 nt, Artificial Sequence
  HTT spacer sequence TTCN PAM
gcaaaugugcugcuucugcu

SEQ ID NO: 36644 - RNA, 20 nt, Artificial Sequence
  HTT spacer sequence TTCN PAM
gcuaaguggcugugacuuca

SEQ ID NO: 36645 - RNA, 20 nt, Artificial Sequence
  HTT spacer sequence TTCN PAM
ugcagccuucacuugguuug

SEQ ID NO: 36646 - RNA, 20 nt, Artificial Sequence
  HTT spacer sequence TTCN PAM
cuugguuugucaucagugga

SEQ ID NO: 36647 - RNA, 20 nt, Artificial Sequence
  HTT spacer sequence TTCN PAM
acaacacagggcaucuccac

SEQ ID NO: 36648 - RNA, 20 nt, Artificial Sequence
  HTT spacer sequence TTCN PAM
gcaggcagcccauggcuuuc

SEQ ID NO: 36649 - RNA, 20 nt, Artificial Sequence
  HTT spacer sequence TTCN PAM
cugugucgcauugaagcagc

SEQ ID NO: 36650 - RNA, 20 nt, Artificial Sequence
  HTT spacer sequence TTCN PAM
augcgacacagggaaagcca

SEQ ID NO: 36651 - RNA, 20 nt, Artificial Sequence
  HTT spacer sequence TTCN PAM
ugugacagaugaucagcuug

SEQ ID NO: 36652 - RNA, 20 nt, Artificial Sequence
  HTT spacer sequence TTCN PAM
caaagcuuaaaaaaaugcua

SEQ ID NO: 36653 - RNA, 20 nt, Artificial Sequence
  HTT spacer sequence TTCN PAM
uccucagugaggaaggugau

SEQ ID NO: 36654 - RNA, 20 nt, Artificial Sequence
  HTT spacer sequence TTCN PAM
ucacugaggaugaaauggca

SEQ ID NO: 36655 - RNA, 20 nt, Artificial Sequence
  HTT spacer sequence TTCN PAM
cuuuagcgguuaauguacuc

SEQ ID NO: 36656 - RNA, 20 nt, Artificial Sequence
  HTT spacer sequence TTCN PAM
uguauacuuggcguaagugc

SEQ ID NO: 36657 - RNA, 20 nt, Artificial Sequence
  HTT spacer sequence TTCN PAM
cugucaucuuuuuuguuucu

SEQ ID NO: 36658 - RNA, 20 nt, Artificial Sequence
  HTT spacer sequence TTCN PAM
uggaagguuucuauuacaac

SEQ ID NO: 36659 - RNA, 20 nt, Artificial Sequence
  HTT spacer sequence TTCN PAM
aagaaacaaaaaagaugaca

SEQ ID NO: 36660 - RNA, 20 nt, Artificial Sequence
  HTT spacer sequence TTCN PAM
auuacaacugguugguauuc

SEQ ID NO: 36661 - RNA, 20 nt, Artificial Sequence
  HTT spacer sequence TTCN PAM
uuuagaagacauuguuacaa

SEQ ID NO: 36662 - RNA, 20 nt, Artificial Sequence
  HTT spacer sequence TTCN PAM
aaaagaauaccaaccaguug

SEQ ID NO: 36663 - RNA, 20 nt, Artificial Sequence
  HTT spacer sequence TTCN PAM
gcuguuuuguaacaaugucu

SEQ ID NO: 36664 - RNA, 20 nt, Artificial Sequence
  HTT spacer sequence TTCN PAM
accuucagcuguuuuguaac

SEQ ID NO: 36665 - RNA, 20 nt, Artificial Sequence
  HTT spacer sequence TTCN PAM
auugccaggaacuaggcaca

SEQ ID NO: 36666 - RNA, 20 nt, Artificial Sequence
  HTT spacer sequence TTCN PAM
uggcaauagaaaguauguug

SEQ ID NO: 36667 - RNA, 20 nt, Artificial Sequence
  HTT spacer sequence TTCN PAM
agucugguaggugaaucaca

SEQ ID NO: 36668 - RNA, 20 nt, Artificial Sequence
  HTT spacer sequence TTCN PAM
ccuaccagacuugaagaugu

SEQ ID NO: 36669 - RNA, 20 nt, Artificial Sequence
  HTT spacer sequence TTCN PAM
uggagugucucguuccccau

SEQ ID NO: 36670 - RNA, 20 nt, Artificial Sequence
  HTT spacer sequence TTCN PAM
ccauucugcacuauacacuc

SEQ ID NO: 36671 - RNA, 20 nt, Artificial Sequence
  HTT spacer sequence TTCN PAM
gcacuauacacucucagagu

SEQ ID NO: 36672 - RNA, 20 nt, Artificial Sequence
  HTT spacer sequence TTCN PAM
accgggcagcacagcuccua

SEQ ID NO: 36673 - RNA, 20 nt, Artificial Sequence
  HTT spacer sequence TTCN PAM
acuggcacacugggcaaggc

SEQ ID NO: 36674 - RNA, 20 nt, Artificial Sequence
  HTT spacer sequence TTCN PAM
acucuuggguauauacccaa

SEQ ID NO: 36675 - RNA, 20 nt, Artificial Sequence
  HTT spacer sequence TTCN PAM
uuuggguauauacccaagag

SEQ ID NO: 36676 - RNA, 20 nt, Artificial Sequence
  HTT spacer sequence TTCN PAM
auucuuuuggguauauaccc

SEQ ID NO: 36677 - RNA, 20 nt, Artificial Sequence
  HTT spacer sequence TTCN PAM
ccacccugcuuuccauucuu

SEQ ID NO: 36678 - RNA, 20 nt, Artificial Sequence
  HTT spacer sequence TTCN PAM
uagcagcauuauucacgaua

SEQ ID NO: 36679 - RNA, 20 nt, Artificial Sequence
  HTT spacer sequence TTCN PAM
cgauagcuaaaauguggaac

SEQ ID NO: 36680 - RNA, 20 nt, Artificial Sequence
  HTT spacer sequence TTCN PAM
acauuuuagcuaucgugaau

SEQ ID NO: 36681 - RNA, 20 nt, Artificial Sequence
  HTT spacer sequence TTCN PAM
guugguuccacauuuuagcu

SEQ ID NO: 36682 - RNA, 20 nt, Artificial Sequence
  HTT spacer sequence TTCN PAM
uccaucgagggacacuucag

SEQ ID NO: 36683 - RNA, 20 nt, Artificial Sequence
  HTT spacer sequence TTCN PAM
acuguaaauauacaccagau

SEQ ID NO: 36684 - RNA, 20 nt, Artificial Sequence
  HTT spacer sequence TTCN PAM
gccuuaaaaaaaggacauuc

SEQ ID NO: 36685 - RNA, 20 nt, Artificial Sequence
  HTT spacer sequence TTCN PAM
gacacaugcuacaacauggg

SEQ ID NO: 36686 - RNA, 20 nt, Artificial Sequence
  HTT spacer sequence TTCN PAM
uuuagcauaauguccuuaag

SEQ ID NO: 36687 - RNA, 20 nt, Artificial Sequence
  HTT spacer sequence TTCN PAM
acuuacaugagggaccugga

SEQ ID NO: 36688 - RNA, 20 nt, Artificial Sequence
  HTT spacer sequence TTCN PAM
uagauauagaaaguagaaug

SEQ ID NO: 36689 - RNA, 20 nt, Artificial Sequence
  HTT spacer sequence TTCN PAM
auaucuaugaauuaacuacu

SEQ ID NO: 36690 - RNA, 20 nt, Artificial Sequence
  HTT spacer sequence TTCN PAM
acuuucuauaucuaugaauu

SEQ ID NO: 36691 - RNA, 20 nt, Artificial Sequence
  HTT spacer sequence TTCN PAM
ucuuguaaaaauaacucccc

SEQ ID NO: 36692 - RNA, 20 nt, Artificial Sequence
  HTT spacer sequence TTCN PAM
agaaaugaaugguggugaug

SEQ ID NO: 36693 - RNA, 20 nt, Artificial Sequence
  HTT spacer sequence TTCN PAM
agaauaacucucuucaucuu

SEQ ID NO: 36694 - RNA, 20 nt, Artificial Sequence
  HTT spacer sequence TTCN PAM
uuucuagaauaacucucuuc

SEQ ID NO: 36695 - RNA, 20 nt, Artificial Sequence
  HTT spacer sequence TTCN PAM
uaauguuauacaaccaucac

SEQ ID NO: 36696 - RNA, 20 nt, Artificial Sequence
  HTT spacer sequence TTCN PAM
guagcauuaaguacauucau

SEQ ID NO: 36697 - RNA, 20 nt, Artificial Sequence
  HTT spacer sequence TTCN PAM
ggcaugagccaugacaccug

SEQ ID NO: 36698 - RNA, 20 nt, Artificial Sequence
  HTT spacer sequence TTCN PAM
ugccacugcacuccagccuc

SEQ ID NO: 36699 - RNA, 20 nt, Artificial Sequence
  HTT spacer sequence TTCN PAM
agugauccuuuuaccuugac

SEQ ID NO: 36700 - RNA, 20 nt, Artificial Sequence
  HTT spacer sequence TTCN PAM
uuguagagauaggggucucg

SEQ ID NO: 36701 - RNA, 20 nt, Artificial Sequence
  HTT spacer sequence TTCN PAM
aggcugcagggagcuauuau

SEQ ID NO: 36702 - RNA, 20 nt, Artificial Sequence
  HTT spacer sequence TTCN PAM
guagcccaggcuggagugca

SEQ ID NO: 36703 - RNA, 20 nt, Artificial Sequence
  HTT spacer sequence TTCN PAM
uccuccuguguuaaauuugg

SEQ ID NO: 36704 - RNA, 20 nt, Artificial Sequence
  HTT spacer sequence TTCN PAM
ccguccuugaucauuuguaa

SEQ ID NO: 36705 - RNA, 20 nt, Artificial Sequence
  HTT spacer sequence TTCN PAM
ggugugagcuaccaugccca

SEQ ID NO: 36706 - RNA, 20 nt, Artificial Sequence
  HTT spacer sequence TTCN PAM
cuagagacauggucucgauc

SEQ ID NO: 36707 - RNA, 20 nt, Artificial Sequence
  HTT spacer sequence TTCN PAM
uucucuagagacauggucuc

SEQ ID NO: 36708 - RNA, 20 nt, Artificial Sequence
  HTT spacer sequence TTCN PAM
cuguccuugucauuuucuuu

SEQ ID NO: 36709 - RNA, 20 nt, Artificial Sequence
  HTT spacer sequence TTCN PAM
uggguucacuguccuuguca

SEQ ID NO: 36710 - RNA, 20 nt, Artificial Sequence
  HTT spacer sequence TTCN PAM
augcuugcugcacagcuggc

SEQ ID NO: 36711 - RNA, 20 nt, Artificial Sequence
  HTT spacer sequence TTCN PAM
aagaagaacgaucguuugua

SEQ ID NO: 36712 - RNA, 20 nt, Artificial Sequence
  HTT spacer sequence TTCN PAM
uggaaaacacacuguccuaa

SEQ ID NO: 36713 - RNA, 20 nt, Artificial Sequence
  HTT spacer sequence TTCN PAM
ucuuggaaaacacacugucc

SEQ ID NO: 36714 - RNA, 20 nt, Artificial Sequence
  HTT spacer sequence TTCN PAM
cauuacaaacgaucguucuu

SEQ ID NO: 36715 - RNA, 20 nt, Artificial Sequence
  HTT spacer sequence TTCN PAM
agcuauuuagucauuuauuu

SEQ ID NO: 36716 - RNA, 20 nt, Artificial Sequence
  HTT spacer sequence TTCN PAM
aggggauaggcacgucuuuc

SEQ ID NO: 36717 - RNA, 20 nt, Artificial Sequence
  HTT spacer sequence TTCN PAM
ucucucaagaaaauagaaag

SEQ ID NO: 36718 - RNA, 20 nt, Artificial Sequence
  HTT spacer sequence TTCN PAM
cucaagaaaauagaaaggca

SEQ ID NO: 36719 - RNA, 20 nt, Artificial Sequence
  HTT spacer sequence TTCN PAM
ugagagaagaaagacgugcc

SEQ ID NO: 36720 - RNA, 20 nt, Artificial Sequence
  HTT spacer sequence TTCN PAM
auuuucuugagagaagaaag

SEQ ID NO: 36721 - RNA, 20 nt, Artificial Sequence
  HTT spacer sequence TTCN PAM
aauuucuaguaacagcaaac

SEQ ID NO: 36722 - RNA, 20 nt, Artificial Sequence
  HTT spacer sequence TTCN PAM
aguaacagcaaacagcauua

SEQ ID NO: 36723 - RNA, 20 nt, Artificial Sequence
  HTT spacer sequence TTCN PAM
gcaguugaucuguuggaagc

SEQ ID NO: 36724 - RNA, 20 nt, Artificial Sequence
  HTT spacer sequence TTCN PAM
aacagaucaacugcugaaca

SEQ ID NO: 36725 - RNA, 20 nt, Artificial Sequence
  HTT spacer sequence TTCN PAM
ccuuuaagcggcuuaggagu

SEQ ID NO: 36726 - RNA, 20 nt, Artificial Sequence
  HTT spacer sequence TTCN PAM
auaggucuuugaucgugacu

SEQ ID NO: 36727 - RNA, 20 nt, Artificial Sequence
  HTT spacer sequence TTCN PAM
aggauccuuggcucucuugg

SEQ ID NO: 36728 - RNA, 20 nt, Artificial Sequence
  HTT spacer sequence TTCN PAM
caagagagccaaggauccua

SEQ ID NO: 36729 - RNA, 20 nt, Artificial Sequence
  HTT spacer sequence TTCN PAM
gauagucauaauguaaauac

SEQ ID NO: 36730 - RNA, 20 nt, Artificial Sequence
  HTT spacer sequence TTCN PAM
uucuuucuuucuuucuuucu

SEQ ID NO: 36731 - RNA, 20 nt, Artificial Sequence
  HTT spacer sequence TTCN PAM
uucuuucuuucuuucuuuuu

SEQ ID NO: 36732 - RNA, 20 nt, Artificial Sequence
  HTT spacer sequence TTCN PAM
uucuuucuuucuuuuuuuuu

SEQ ID NO: 36733 - RNA, 20 nt, Artificial Sequence
  HTT spacer sequence TTCN PAM
uucuuucuuuuuuuuuuuga

SEQ ID NO: 36734 - RNA, 20 nt, Artificial Sequence
  HTT spacer sequence TTCN PAM
uucuuuuuuuuuuugagaca

SEQ ID NO: 36735 - RNA, 20 nt, Artificial Sequence
  HTT spacer sequence TTCN PAM
uuuuuuuuuugagacagagu

SEQ ID NO: 36736 - RNA, 20 nt, Artificial Sequence
  HTT spacer sequence TTCN PAM
cucuuguugcccauccugga

SEQ ID NO: 36737 - RNA, 20 nt, Artificial Sequence
  HTT spacer sequence TTCN PAM
agcaauucuccugccucagc

SEQ ID NO: 36738 - RNA, 20 nt, Artificial Sequence
  HTT spacer sequence TTCN PAM
ccugccucagccucccgagu

SEQ ID NO: 36739 - RNA, 20 nt, Artificial Sequence
  HTT spacer sequence TTCN PAM
ccauguugaggcuggucucg

SEQ ID NO: 36740 - RNA, 20 nt, Artificial Sequence
  HTT spacer sequence TTCN PAM
agaccagccucaacauggag

SEQ ID NO: 36741 - RNA, 20 nt, Artificial Sequence
  HTT spacer sequence TTCN PAM
uuuuugaaaucaauguauga

SEQ ID NO: 36742 - RNA, 20 nt, Artificial Sequence
  HTT spacer sequence TTCN PAM
aaaaugaaagcucgggccgg

SEQ ID NO: 36743 - RNA, 20 nt, Artificial Sequence
  HTT spacer sequence TTCN PAM
gucauacauugauuucaaaa

SEQ ID NO: 36744 - RNA, 20 nt, Artificial Sequence
  HTT spacer sequence TTCN PAM
guguuucagucauacauuga

SEQ ID NO: 36745 - RNA, 20 nt, Artificial Sequence
  HTT spacer sequence TTCN PAM
gaacagaaugaaaaugucuu

SEQ ID NO: 36746 - RNA, 20 nt, Artificial Sequence
  HTT spacer sequence TTCN PAM
gaaaccauaauuaagucagu

SEQ ID NO: 36747 - RNA, 20 nt, Artificial Sequence
  HTT spacer sequence TTCN PAM
guucugaaaccauaauuaag

SEQ ID NO: 36748 - RNA, 20 nt, Artificial Sequence
  HTT spacer sequence TTCN PAM
uucuguucugaaaccauaau

SEQ ID NO: 36749 - RNA, 20 nt, Artificial Sequence
  HTT spacer sequence TTCN PAM
guucugaugaauauaaaagg

SEQ ID NO: 36750 - RNA, 20 nt, Artificial Sequence
  HTT spacer sequence TTCN PAM
gaugaauauaaaaggaaaac

SEQ ID NO: 36751 - RNA, 20 nt, Artificial Sequence
  HTT spacer sequence TTCN PAM
ucagaaccgaagacauuuuc

SEQ ID NO: 36752 - RNA, 20 nt, Artificial Sequence
  HTT spacer sequence TTCN PAM
uuuuauauucaucagaaccg

SEQ ID NO: 36753 - RNA, 20 nt, Artificial Sequence
  HTT spacer sequence TTCN PAM
acuccccaccucuaucucua

SEQ ID NO: 36754 - RNA, 20 nt, Artificial Sequence
  HTT spacer sequence TTCN PAM
ccuuccacuccccaccucua

SEQ ID NO: 36755 - RNA, 20 nt, Artificial Sequence
  HTT spacer sequence TTCN PAM
ccuagcauuguugggauuau

SEQ ID NO: 36756 - RNA, 20 nt, Artificial Sequence
  HTT spacer sequence TTCN PAM
gaugauguaaccauauaauc

SEQ ID NO: 36757 - RNA, 20 nt, Artificial Sequence
  HTT spacer sequence TTCN PAM
gaggucuccaaauagaacua

SEQ ID NO: 36758 - RNA, 20 nt, Artificial Sequence
  HTT spacer sequence TTCN PAM
auuuggagaccucugaagcc

SEQ ID NO: 36759 - RNA, 20 nt, Artificial Sequence
  HTT spacer sequence TTCN PAM
gauuguuaggagguaguaua

SEQ ID NO: 36760 - RNA, 20 nt, Artificial Sequence
  HTT spacer sequence TTCN PAM
gacaacuuuagacaucaccc

SEQ ID NO: 36761 - RNA, 20 nt, Artificial Sequence
  HTT spacer sequence TTCN PAM
acagucuuucaguugcaggg

SEQ ID NO: 36762 - RNA, 20 nt, Artificial Sequence
  HTT spacer sequence TTCN PAM
guugcagggauaaaacccca

SEQ ID NO: 36763 - RNA, 20 nt, Artificial Sequence
  HTT spacer sequence TTCN PAM
cuuacucuaguuuaaacugg

SEQ ID NO: 36764 - RNA, 20 nt, Artificial Sequence
  HTT spacer sequence TTCN PAM
uucucuuacucuaguuuaaa

SEQ ID NO: 36765 - RNA, 20 nt, Artificial Sequence
  HTT spacer sequence TTCN PAM
aggagcuuaaaccaacacau

SEQ ID NO: 36766 - RNA, 20 nt, Artificial Sequence
  HTT spacer sequence TTCN PAM
guggucugcauuguauauuu

SEQ ID NO: 36767 - RNA, 20 nt, Artificial Sequence
  HTT spacer sequence TTCN PAM
ucuuuucauuuauauaauuu

SEQ ID NO: 36768 - RNA, 20 nt, Artificial Sequence
  HTT spacer sequence TTCN PAM
uuucauuuauauaauuuuua

SEQ ID NO: 36769 - RNA, 20 nt, Artificial Sequence
  HTT spacer sequence TTCN PAM
uuuauauaauuuuuaaauuu

SEQ ID NO: 36770 - RNA, 20 nt, Artificial Sequence
  HTT spacer sequence TTCN PAM
gccuaggcgacaaagugaga

SEQ ID NO: 36771 - RNA, 20 nt, Artificial Sequence
  HTT spacer sequence TTCN PAM
ugccacugcacuucagccua

SEQ ID NO: 36772 - RNA, 20 nt, Artificial Sequence
  HTT spacer sequence TTCN PAM
aggcuagagugagccucgca

SEQ ID NO: 36773 - RNA, 20 nt, Artificial Sequence
  HTT spacer sequence TTCN PAM
uccugccucagccuucuaag

SEQ ID NO: 36774 - RNA, 20 nt, Artificial Sequence
  HTT spacer sequence TTCN PAM
ugccucagccuucuaaguag

SEQ ID NO: 36775 - RNA, 20 nt, Artificial Sequence
  HTT spacer sequence TTCN PAM
aaguagcugagacaauaggc

SEQ ID NO: 36776 - RNA, 20 nt, Artificial Sequence
  HTT spacer sequence TTCN PAM
acaaaaaaauuuuaaaaccu

SEQ ID NO: 36777 - RNA, 20 nt, Artificial Sequence
  HTT spacer sequence TTCN PAM
auuucuacaaaaaaauuuua

SEQ ID NO: 36778 - RNA, 20 nt, Artificial Sequence
  HTT spacer sequence TTCN PAM
ggcgauccuccugccucugc

SEQ ID NO: 36779 - RNA, 20 nt, Artificial Sequence
  HTT spacer sequence TTCN PAM
uguguuaguuuuguucucug

SEQ ID NO: 36780 - RNA, 20 nt, Artificial Sequence
  HTT spacer sequence TTCN PAM
cuggugggcuguuuucacau

SEQ ID NO: 36781 - RNA, 20 nt, Artificial Sequence
  HTT spacer sequence TTCN PAM
caugaccgaagaugaccucu

SEQ ID NO: 36782 - RNA, 20 nt, Artificial Sequence
  HTT spacer sequence TTCN PAM
gucaugugaaaacagcccac

SEQ ID NO: 36783 - RNA, 20 nt, Artificial Sequence
  HTT spacer sequence TTCN PAM
cagccccucaaguaggccua

SEQ ID NO: 36784 - RNA, 20 nt, Artificial Sequence
  HTT spacer sequence TTCN PAM
gggguuuauggucacccaua

SEQ ID NO: 36785 - RNA, 20 nt, Artificial Sequence
  HTT spacer sequence TTCN PAM
auugaugaggagguggggcu

SEQ ID NO: 36786 - RNA, 20 nt, Artificial Sequence
  HTT spacer sequence TTCN PAM
aacugcugugcugcuauccc

SEQ ID NO: 36787 - RNA, 20 nt, Artificial Sequence
  HTT spacer sequence TTCN PAM
gguaguuaccuccaaaauuc

SEQ ID NO: 36788 - RNA, 20 nt, Artificial Sequence
  HTT spacer sequence TTCN PAM
guucugguaguuaccuccaa

SEQ ID NO: 36789 - RNA, 20 nt, Artificial Sequence
  HTT spacer sequence TTCN PAM
guuuucaguucugguaguua

SEQ ID NO: 36790 - RNA, 20 nt, Artificial Sequence
  HTT spacer sequence TTCN PAM
cuuacuggauuuuuguacac

SEQ ID NO: 36791 - RNA, 20 nt, Artificial Sequence
  HTT spacer sequence TTCN PAM
gccuugguccauuugaggau

SEQ ID NO: 36792 - RNA, 20 nt, Artificial Sequence
  HTT spacer sequence TTCN PAM
guugagcauccuggcucuug

SEQ ID NO: 36793 - RNA, 20 nt, Artificial Sequence
  HTT spacer sequence TTCN PAM
gugcaggcaagagccaggau

SEQ ID NO: 36794 - RNA, 20 nt, Artificial Sequence
  HTT spacer sequence TTCN PAM
agucagugcgucaguaucac

SEQ ID NO: 36795 - RNA, 20 nt, Artificial Sequence
  HTT spacer sequence TTCN PAM
uaugaagaagaacaguagug

SEQ ID NO: 36796 - RNA, 20 nt, Artificial Sequence
  HTT spacer sequence TTCN PAM
uaggaaauaucaagacuugu

SEQ ID NO: 36797 - RNA, 20 nt, Artificial Sequence
  HTT spacer sequence TTCN PAM
ucauaggaaauaucaagacu

SEQ ID NO: 36798 - RNA, 20 nt, Artificial Sequence
  HTT spacer sequence TTCN PAM
ucuucauaggaaauaucaag

SEQ ID NO: 36799 - RNA, 20 nt, Artificial Sequence
  HTT spacer sequence TTCN PAM
ucugucacugcacuacuguu

SEQ ID NO: 36800 - RNA, 20 nt, Artificial Sequence
  HTT spacer sequence TTCN PAM
gagggagagaaguagcuagc

SEQ ID NO: 36801 - RNA, 20 nt, Artificial Sequence
  HTT spacer sequence TTCN PAM
cucccucagaaauccugccu

SEQ ID NO: 36802 - RNA, 20 nt, Artificial Sequence
  HTT spacer sequence TTCN PAM
cugcaaaaagcuagcuacuu

SEQ ID NO: 36803 - RNA, 20 nt, Artificial Sequence
  HTT spacer sequence TTCN PAM
ggcacccaagagagcagcug

SEQ ID NO: 36804 - RNA, 20 nt, Artificial Sequence
  HTT spacer sequence TTCN PAM
guggcgccgugcggccgggc

SEQ ID NO: 36805 - RNA, 20 nt, Artificial Sequence
  HTT spacer sequence TTCN PAM
ccaggauucuguggcgccgu

SEQ ID NO: 36806 - RNA, 20 nt, Artificial Sequence
  HTT spacer sequence TTCN PAM
uggccucugcauucagcugc

SEQ ID NO: 36807 - RNA, 20 nt, Artificial Sequence
  HTT spacer sequence TTCN PAM
gcugcugucacccuccgcac

SEQ ID NO: 36808 - RNA, 20 nt, Artificial Sequence
  HTT spacer sequence TTCN PAM
uaguggacucuaguuuuuga

SEQ ID NO: 36809 - RNA, 20 nt, Artificial Sequence
  HTT spacer sequence TTCN PAM
auaauagcaaguaaggcuca

SEQ ID NO: 36810 - RNA, 20 nt, Artificial Sequence
  HTT spacer sequence TTCN PAM
uguuucuuuuuaaagaucuu

SEQ ID NO: 36811 - RNA, 20 nt, Artificial Sequence
  HTT spacer sequence TTCN PAM
uuuuaaagaucuucggauua

SEQ ID NO: 36812 - RNA, 20 nt, Artificial Sequence
  HTT spacer sequence TTCN PAM
gauuaugcuucacugaccac

SEQ ID NO: 36813 - RNA, 20 nt, Artificial Sequence
  HTT spacer sequence TTCN PAM
cugaccacuguaauaaguuu

SEQ ID NO: 36814 - RNA, 20 nt, Artificial Sequence
  HTT spacer sequence TTCN PAM
caacuuuaaacuuauuacag

SEQ ID NO: 36815 - RNA, 20 nt, Artificial Sequence
  HTT spacer sequence TTCN PAM
uuaacaagccauauuuucuc

SEQ ID NO: 36816 - RNA, 20 nt, Artificial Sequence
  HTT spacer sequence TTCN PAM
aaggacuagucuugccuuug

SEQ ID NO: 36817 - RNA, 20 nt, Artificial Sequence
  HTT spacer sequence TTCN PAM
guguccuucuacauguccga

SEQ ID NO: 36818 - RNA, 20 nt, Artificial Sequence
  HTT spacer sequence TTCN PAM
acauguccgagcgaucucug

SEQ ID NO: 36819 - RNA, 20 nt, Artificial Sequence
  HTT spacer sequence TTCN PAM
ucuccuuccaucucacaauu

SEQ ID NO: 36820 - RNA, 20 nt, Artificial Sequence
  HTT spacer sequence TTCN PAM
aucucacaauugaggcaaaa

SEQ ID NO: 36821 - RNA, 20 nt, Artificial Sequence
  HTT spacer sequence TTCN PAM
acaguaacaauauuuugccu

SEQ ID NO: 36822 - RNA, 20 nt, Artificial Sequence
  HTT spacer sequence TTCN PAM
agcagagacaggaugucugc

SEQ ID NO: 36823 - RNA, 20 nt, Artificial Sequence
  HTT spacer sequence TTCN PAM
guaccugaaauguggcuggu

SEQ ID NO: 36824 - RNA, 20 nt, Artificial Sequence
  HTT spacer sequence TTCN PAM
gguacagaacaccacaugug

SEQ ID NO: 36825 - RNA, 20 nt, Artificial Sequence
  HTT spacer sequence TTCN PAM
caacagaccugcacugucuc

SEQ ID NO: 36826 - RNA, 20 nt, Artificial Sequence
  HTT spacer sequence TTCN PAM
ugcugguaucuuuugaccuu

SEQ ID NO: 36827 - RNA, 20 nt, Artificial Sequence
  HTT spacer sequence TTCN PAM
gucuucuuguuuccuuugac

SEQ ID NO: 36828 - RNA, 20 nt, Artificial Sequence
  HTT spacer sequence TTCN PAM
uguuuccuuugacugcauuu

SEQ ID NO: 36829 - RNA, 20 nt, Artificial Sequence
  HTT spacer sequence TTCN PAM
uuugacugcauuuauuugaa

SEQ ID NO: 36830 - RNA, 20 nt, Artificial Sequence
  HTT spacer sequence TTCN PAM
aauaaaugcagucaaaggaa

SEQ ID NO: 36831 - RNA, 20 nt, Artificial Sequence
  HTT spacer sequence TTCN PAM
gccaccuagugucuuucaaa

SEQ ID NO: 36832 - RNA, 20 nt, Artificial Sequence
  HTT spacer sequence TTCN PAM
agauaagaguugaaauaauu

SEQ ID NO: 36833 - RNA, 20 nt, Artificial Sequence
  HTT spacer sequence TTCN PAM
acucuuaucuugaaaccaau

SEQ ID NO: 36834 - RNA, 20 nt, Artificial Sequence
  HTT spacer sequence TTCN PAM
ucucguguuuuuauauaagu

SEQ ID NO: 36835 - RNA, 20 nt, Artificial Sequence
  HTT spacer sequence TTCN PAM
cguacugcuuaaacaaaggc

SEQ ID NO: 36836 - RNA, 20 nt, Artificial Sequence
  HTT spacer sequence TTCN PAM
uagccuuuguuuaagcagua

SEQ ID NO: 36837 - RNA, 20 nt, Artificial Sequence
  HTT spacer sequence TTCN PAM
acccauaaaccgaaaaugaa

SEQ ID NO: 36838 - RNA, 20 nt, Artificial Sequence
  HTT spacer sequence TTCN PAM
guuuauggguggaauucaua

SEQ ID NO: 36839 - RNA, 20 nt, Artificial Sequence
  HTT spacer sequence TTCN PAM
uuuucgguuuauggguggaa

SEQ ID NO: 36840 - RNA, 20 nt, Artificial Sequence
  HTT spacer sequence TTCN PAM
ggcguggguacuucuuaaau

SEQ ID NO: 36841 - RNA, 20 nt, Artificial Sequence
  HTT spacer sequence TTCN PAM
uaaauaauaccugguucagg

SEQ ID NO: 36842 - RNA, 20 nt, Artificial Sequence
  HTT spacer sequence TTCN PAM
ggaacuagucagaauggcac

SEQ ID NO: 36843 - RNA, 20 nt, Artificial Sequence
  HTT spacer sequence TTCN PAM
ugaaccagguauuauuuaag

SEQ ID NO: 36844 - RNA, 20 nt, Artificial Sequence
  HTT spacer sequence TTCN PAM
gacuaguuccugaaccaggu

SEQ ID NO: 36845 - RNA, 20 nt, Artificial Sequence
  HTT spacer sequence TTCN PAM
ugcuuuuccucuuguuggga

SEQ ID NO: 36846 - RNA, 20 nt, Artificial Sequence
  HTT spacer sequence TTCN PAM
ucuuguugggagaggagggu

SEQ ID NO: 36847 - RNA, 20 nt, Artificial Sequence
  HTT spacer sequence TTCN PAM
ucccaaagugguuugccuau

SEQ ID NO: 36848 - RNA, 20 nt, Artificial Sequence
  HTT spacer sequence TTCN PAM
cauuccaucuaggauaagca

SEQ ID NO: 36849 - RNA, 20 nt, Artificial Sequence
  HTT spacer sequence TTCN PAM
aucuaggauaagcagaauag

SEQ ID NO: 36850 - RNA, 20 nt, Artificial Sequence
  HTT spacer sequence TTCN PAM
gcuuauccuagauggaaugu

SEQ ID NO: 36851 - RNA, 20 nt, Artificial Sequence
  HTT spacer sequence TTCN PAM
uggcuauucugcuuauccua

SEQ ID NO: 36852 - RNA, 20 nt, Artificial Sequence
  HTT spacer sequence TTCN PAM
aaaccagucuaucuuggacc

SEQ ID NO: 36853 - RNA, 20 nt, Artificial Sequence
  HTT spacer sequence TTCN PAM
accuccugggccucuggugc

SEQ ID NO: 36854 - RNA, 20 nt, Artificial Sequence
  HTT spacer sequence TTCN PAM
gccacauggacaacaaacaa

SEQ ID NO: 36855 - RNA, 20 nt, Artificial Sequence
  HTT spacer sequence TTCN PAM
agcuuugcucaccgugauuu

SEQ ID NO: 36856 - RNA, 20 nt, Artificial Sequence
  HTT spacer sequence TTCN PAM
aggacacaucuugugcucuu

SEQ ID NO: 36857 - RNA, 20 nt, Artificial Sequence
  HTT spacer sequence TTCN PAM
cugccugccauccagacuau

SEQ ID NO: 36858 - RNA, 20 nt, Artificial Sequence
  HTT spacer sequence TTCN PAM
ucccugaguccuggucgugg

SEQ ID NO: 36859 - RNA, 20 nt, Artificial Sequence
  HTT spacer sequence TTCN PAM
ucuguggcagaggggauggc

SEQ ID NO: 36860 - RNA, 20 nt, Artificial Sequence
  HTT spacer sequence TTCN PAM
cuguccuuuccaaagcgucu

SEQ ID NO: 36861 - RNA, 20 nt, Artificial Sequence
  HTT spacer sequence TTCN PAM
aaagcgucugugguuccacu

SEQ ID NO: 36862 - RNA, 20 nt, Artificial Sequence
  HTT spacer sequence TTCN PAM
acuuuuuggggcaaagcagg

SEQ ID NO: 36863 - RNA, 20 nt, Artificial Sequence
  HTT spacer sequence TTCN PAM
ugcuuugccccaaaaagugg

SEQ ID NO: 36864 - RNA, 20 nt, Artificial Sequence
  HTT spacer sequence TTCN PAM
aguauuccugcuuugcccca

SEQ ID NO: 36865 - RNA, 20 nt, Artificial Sequence
  HTT spacer sequence TTCN PAM
cucucuuccaguauuccugc

SEQ ID NO: 36866 - RNA, 20 nt, Artificial Sequence
  HTT spacer sequence TTCN PAM
auaguaauaaaguugacauu

SEQ ID NO: 36867 - RNA, 20 nt, Artificial Sequence
  HTT spacer sequence TTCN PAM
aguucaugcuuggggaaagg

SEQ ID NO: 36868 - RNA, 20 nt, Artificial Sequence
  HTT spacer sequence TTCN PAM
ugcuuggggaaaggacaggg

SEQ ID NO: 36869 - RNA, 20 nt, Artificial Sequence
  HTT spacer sequence TTCN PAM
ccaagcaugaacuugaauca

SEQ ID NO: 36870 - RNA, 20 nt, Artificial Sequence
  HTT spacer sequence TTCN PAM
auugcucccagcauuauaau

SEQ ID NO: 36871 - RNA, 20 nt, Artificial Sequence
  HTT spacer sequence TTCN PAM
cauggguaugugguagguuu

SEQ ID NO: 36872 - RNA, 20 nt, Artificial Sequence
  HTT spacer sequence TTCN PAM
uagaacugcucugugaagua

SEQ ID NO: 36873 - RNA, 20 nt, Artificial Sequence
  HTT spacer sequence TTCN PAM
aagaauuaacugggauaauu

SEQ ID NO: 36874 - RNA, 20 nt, Artificial Sequence
  HTT spacer sequence TTCN PAM
cagagcaguucuaagaauua

SEQ ID NO: 36875 - RNA, 20 nt, Artificial Sequence
  HTT spacer sequence TTCN PAM
cgcuuugugcuuaaguucua

SEQ ID NO: 36876 - RNA, 20 nt, Artificial Sequence
  HTT spacer sequence TTCN PAM
aaaagauccugugccaaaac

SEQ ID NO: 36877 - RNA, 20 nt, Artificial Sequence
  HTT spacer sequence TTCN PAM
ugguuuuggcacaggaucuu

SEQ ID NO: 36878 - RNA, 20 nt, Artificial Sequence
  HTT spacer sequence TTCN PAM
uucuugguuuuggcacagga

SEQ ID NO: 36879 - RNA, 20 nt, Artificial Sequence
  HTT spacer sequence TTCN PAM
uucuugcccaucgaucuuuc

SEQ ID NO: 36880 - RNA, 20 nt, Artificial Sequence
  HTT spacer sequence TTCN PAM
ugcccaucgaucuuucucuc

SEQ ID NO: 36881 - RNA, 20 nt, Artificial Sequence
  HTT spacer sequence TTCN PAM
cucaucaggccacuucuugg

SEQ ID NO: 36882 - RNA, 20 nt, Artificial Sequence
  HTT spacer sequence TTCN PAM
uggguugauaguggugagug

SEQ ID NO: 36883 - RNA, 20 nt, Artificial Sequence
  HTT spacer sequence TTCN PAM
gaauacccaccaugggcccc

SEQ ID NO: 36884 - RNA, 20 nt, Artificial Sequence
  HTT spacer sequence TTCN PAM
gaaaguggcagcggcuacac

SEQ ID NO: 36885 - RNA, 20 nt, Artificial Sequence
  HTT spacer sequence TTCN PAM
ccacgccacacagugacugg

SEQ ID NO: 36886 - RNA, 20 nt, Artificial Sequence
  HTT spacer sequence TTCN PAM
cucugugucauagcugaaca

SEQ ID NO: 36887 - RNA, 20 nt, Artificial Sequence
  HTT spacer sequence TTCN PAM
gcuaugacacagagagaacc

SEQ ID NO: 36888 - RNA, 20 nt, Artificial Sequence
  HTT spacer sequence TTCN PAM
gcccuaggagcucucgaugg

SEQ ID NO: 36889 - RNA, 20 nt, Artificial Sequence
  HTT spacer sequence TTCN PAM
accaucgagagcuccuaggg

SEQ ID NO: 36890 - RNA, 20 nt, Artificial Sequence
  HTT spacer sequence TTCN PAM
aaacaggcaggaugugggau

SEQ ID NO: 36891 - RNA, 20 nt, Artificial Sequence
  HTT spacer sequence TTCN PAM
uuauuuccaauuccugcuuc

SEQ ID NO: 36892 - RNA, 20 nt, Artificial Sequence
  HTT spacer sequence TTCN PAM
aauuccugcuuccauuguuc

SEQ ID NO: 36893 - RNA, 20 nt, Artificial Sequence
  HTT spacer sequence TTCN PAM
ugcuuccauuguuccuuuua

SEQ ID NO: 36894 - RNA, 20 nt, Artificial Sequence
  HTT spacer sequence TTCN PAM
auuguuccuuuuaauauuuc

SEQ ID NO: 36895 - RNA, 20 nt, Artificial Sequence
  HTT spacer sequence TTCN PAM
uuuuaauauuucuuuguuua

SEQ ID NO: 36896 - RNA, 20 nt, Artificial Sequence
  HTT spacer sequence TTCN PAM
uuguuuagcucacaaaaaca

SEQ ID NO: 36897 - RNA, 20 nt, Artificial Sequence
  HTT spacer sequence TTCN PAM
cugggugcagccugcauccg

SEQ ID NO: 36898 - RNA, 20 nt, Artificial Sequence
  HTT spacer sequence TTCN PAM
ugcccgccuccuuuccugca

SEQ ID NO: 36899 - RNA, 20 nt, Artificial Sequence
  HTT spacer sequence TTCN PAM
ugcacugccaucguggucuc

SEQ ID NO: 36900 - RNA, 20 nt, Artificial Sequence
  HTT spacer sequence TTCN PAM
cuuccccugagucccuuugg

SEQ ID NO: 36901 - RNA, 20 nt, Artificial Sequence
  HTT spacer sequence TTCN PAM
ccugagucccuuuggcuccc

SEQ ID NO: 36902 - RNA, 20 nt, Artificial Sequence
  HTT spacer sequence TTCN PAM
uucugucucagacugcugcu

SEQ ID NO: 36903 - RNA, 20 nt, Artificial Sequence
  HTT spacer sequence TTCN PAM
gucucagacugcugcucauc

SEQ ID NO: 36904 - RNA, 20 nt, Artificial Sequence
  HTT spacer sequence TTCN PAM
uagggucccgaguagugaug

SEQ ID NO: 36905 - RNA, 20 nt, Artificial Sequence
  HTT spacer sequence TTCN PAM
accgagaagcaucuucucau

SEQ ID NO: 36906 - RNA, 20 nt, Artificial Sequence
  HTT spacer sequence TTCN PAM
cgguggaaccucccuuccua

SEQ ID NO: 36907 - RNA, 20 nt, Artificial Sequence
  HTT spacer sequence TTCN PAM
caucucagccacguucucag

SEQ ID NO: 36908 - RNA, 20 nt, Artificial Sequence
  HTT spacer sequence TTCN PAM
cagugccacuguugucuuug

SEQ ID NO: 36909 - RNA, 20 nt, Artificial Sequence
  HTT spacer sequence TTCN PAM
auggcuucacaccagagaag

SEQ ID NO: 36910 - RNA, 20 nt, Artificial Sequence
  HTT spacer sequence TTCN PAM
caccagagaagguuguuucu

SEQ ID NO: 36911 - RNA, 20 nt, Artificial Sequence
  HTT spacer sequence TTCN PAM
cuggugugaagccauggaaa

SEQ ID NO: 36912 - RNA, 20 nt, Artificial Sequence
  HTT spacer sequence TTCN PAM
ugguuuuaugacaauguauu

SEQ ID NO: 36913 - RNA, 20 nt, Artificial Sequence
  HTT spacer sequence TTCN PAM
ugguucacggaugguuuucc

SEQ ID NO: 36914 - RNA, 20 nt, Artificial Sequence
  HTT spacer sequence TTCN PAM
cggaugguuuuccuccaugu

SEQ ID NO: 36915 - RNA, 20 nt, Artificial Sequence
  HTT spacer sequence TTCN PAM
uccaugugggaauucgggga

SEQ ID NO: 36916 - RNA, 20 nt, Artificial Sequence
  HTT spacer sequence TTCN PAM
cacauggaggaaaaccaucc

SEQ ID NO: 36917 - RNA, 20 nt, Artificial Sequence
  HTT spacer sequence TTCN PAM
gggacccaggcuccuuuccu

SEQ ID NO: 36918 - RNA, 20 nt, Artificial Sequence
  HTT spacer sequence TTCN PAM
uucuuuugguucuguucucc

SEQ ID NO: 36919 - RNA, 20 nt, Artificial Sequence
  HTT spacer sequence TTCN PAM
uuugguucuguucuccaggc

SEQ ID NO: 36920 - RNA, 20 nt, Artificial Sequence
  HTT spacer sequence TTCN PAM
guucuccaggccuucacauc

SEQ ID NO: 36921 - RNA, 20 nt, Artificial Sequence
  HTT spacer sequence TTCN PAM
ccaggccuucacauccucug

SEQ ID NO: 36922 - RNA, 20 nt, Artificial Sequence
  HTT spacer sequence TTCN PAM
cauccucugugucugguugg

SEQ ID NO: 36923 - RNA, 20 nt, Artificial Sequence
  HTT spacer sequence TTCN PAM
cucuccuuguccccaaccag

SEQ ID NO: 36924 - RNA, 20 nt, Artificial Sequence
  HTT spacer sequence TTCN PAM
uuaccuucccucuccuuguc

SEQ ID NO: 36925 - RNA, 20 nt, Artificial Sequence
  HTT spacer sequence TTCN PAM
cucguggugacaggucacag

SEQ ID NO: 36926 - RNA, 20 nt, Artificial Sequence
  HTT spacer sequence TTCN PAM
cagcagcagcacuguggucu

SEQ ID NO: 36927 - RNA, 20 nt, Artificial Sequence
  HTT spacer sequence TTCN PAM
gugaggauaaaaacagguga

SEQ ID NO: 36928 - RNA, 20 nt, Artificial Sequence
  HTT spacer sequence TTCN PAM
aggaugaggaaagucaggga

SEQ ID NO: 36929 - RNA, 20 nt, Artificial Sequence
  HTT spacer sequence TTCN PAM
ucauccuggaaucaccuguu

SEQ ID NO: 36930 - RNA, 20 nt, Artificial Sequence
  HTT spacer sequence TTCN PAM
cugacuuuccucauccugga

SEQ ID NO: 36931 - RNA, 20 nt, Artificial Sequence
  HTT spacer sequence TTCN PAM
aaggguuucccugacuuucc

SEQ ID NO: 36932 - RNA, 20 nt, Artificial Sequence
  HTT spacer sequence TTCN PAM
gaaugagcugcagcgagugc

SEQ ID NO: 36933 - RNA, 20 nt, Artificial Sequence
  HTT spacer sequence TTCN PAM
gaagccaccacuaaucccau

SEQ ID NO: 36934 - RNA, 20 nt, Artificial Sequence
  HTT spacer sequence TTCN PAM
aaagcuuuugcuauucugau

SEQ ID NO: 36935 - RNA, 20 nt, Artificial Sequence
  HTT spacer sequence TTCN PAM
gauaugcccacaccaugccc

SEQ ID NO: 36936 - RNA, 20 nt, Artificial Sequence
  HTT spacer sequence TTCN PAM
ucacucucucugcggagagc

SEQ ID NO: 36937 - RNA, 20 nt, Artificial Sequence
  HTT spacer sequence TTCN PAM
caugagccucuguccaguug

SEQ ID NO: 36938 - RNA, 20 nt, Artificial Sequence
  HTT spacer sequence TTCN PAM
ucccuccaccuggaagggac

SEQ ID NO: 36939 - RNA, 20 nt, Artificial Sequence
  HTT spacer sequence TTCN PAM
agguggagggaggaacaacu

SEQ ID NO: 36940 - RNA, 20 nt, Artificial Sequence
  HTT spacer sequence TTCN PAM
ucauaacaucccagcggaac

SEQ ID NO: 36941 - RNA, 20 nt, Artificial Sequence
  HTT spacer sequence TTCN PAM
gcugggauguuaugaggaac

SEQ ID NO: 36942 - RNA, 20 nt, Artificial Sequence
  HTT spacer sequence TTCN PAM
auccuguccccaaguucauc

SEQ ID NO: 36943 - RNA, 20 nt, Artificial Sequence
  HTT spacer sequence TTCN PAM
uccucauccuccugccggcu

SEQ ID NO: 36944 - RNA, 20 nt, Artificial Sequence
  HTT spacer sequence TTCN PAM
uggccccucuuaugucugcu

SEQ ID NO: 36945 - RNA, 20 nt, Artificial Sequence
  HTT spacer sequence TTCN PAM
ugacgccacauccuucugga

SEQ ID NO: 36946 - RNA, 20 nt, Artificial Sequence
  HTT spacer sequence TTCN PAM
ggauucucuggaauugaauu

SEQ ID NO: 36947 - RNA, 20 nt, Artificial Sequence
  HTT spacer sequence TTCN PAM
cuggaauugaauuuugccuu

SEQ ID NO: 36948 - RNA, 20 nt, Artificial Sequence
  HTT spacer sequence TTCN PAM
agagaauccagaaggaugug

SEQ ID NO: 36949 - RNA, 20 nt, Artificial Sequence
  HTT spacer sequence TTCN PAM
auuccagagaauccagaagg

SEQ ID NO: 36950 - RNA, 20 nt, Artificial Sequence
  HTT spacer sequence TTCN PAM
caaagugcacaggauuacag

SEQ ID NO: 36951 - RNA, 20 nt, Artificial Sequence
  HTT spacer sequence TTCN PAM
acauguugcucaggcuaauc

SEQ ID NO: 36952 - RNA, 20 nt, Artificial Sequence
  HTT spacer sequence TTCN PAM
auagaaaauacaaaaauuag

SEQ ID NO: 36953 - RNA, 20 nt, Artificial Sequence
  HTT spacer sequence TTCN PAM
auagaaacaggauuucaaca

SEQ ID NO: 36954 - RNA, 20 nt, Artificial Sequence
  HTT spacer sequence TTCN PAM
ugaguagcugggaguauagg

SEQ ID NO: 36955 - RNA, 20 nt, Artificial Sequence
  HTT spacer sequence TTCN PAM
gacagggucucacucuguuu

SEQ ID NO: 36956 - RNA, 20 nt, Artificial Sequence
  HTT spacer sequence TTCN PAM
ccguagcgaaacauguaugu

SEQ ID NO: 36957 - RNA, 20 nt, Artificial Sequence
  HTT spacer sequence TTCN PAM
cuacggugaaguaugcaaug

SEQ ID NO: 36958 - RNA, 20 nt, Artificial Sequence
  HTT spacer sequence TTCN PAM
uuuccugccuguagcugcuc

SEQ ID NO: 36959 - RNA, 20 nt, Artificial Sequence
  HTT spacer sequence TTCN PAM
ugccuguagcugcucuuuua

SEQ ID NO: 36960 - RNA, 20 nt, Artificial Sequence
  HTT spacer sequence TTCN PAM
uuuaaggcuggcuuagugug

SEQ ID NO: 36961 - RNA, 20 nt, Artificial Sequence
  HTT spacer sequence TTCN PAM
ugugcccuccugcuuccuuc

SEQ ID NO: 36962 - RNA, 20 nt, Artificial Sequence
  HTT spacer sequence TTCN PAM
uucaugaggggucccucccu

SEQ ID NO: 36963 - RNA, 20 nt, Artificial Sequence
  HTT spacer sequence TTCN PAM
ugaggggucccucccucugu

SEQ ID NO: 36964 - RNA, 20 nt, Artificial Sequence
  HTT spacer sequence TTCN PAM
cauugcccauggugguuugu

SEQ ID NO: 36965 - RNA, 20 nt, Artificial Sequence
  HTT spacer sequence TTCN PAM
cucuuguuucucaagccaug

SEQ ID NO: 36966 - RNA, 20 nt, Artificial Sequence
  HTT spacer sequence TTCN PAM
caagccauggcagccugccu

SEQ ID NO: 36967 - RNA, 20 nt, Artificial Sequence
  HTT spacer sequence TTCN PAM
uucuuucuaggucucucuca

SEQ ID NO: 36968 - RNA, 20 nt, Artificial Sequence
  HTT spacer sequence TTCN PAM
uucuaggucucucucauccu

SEQ ID NO: 36969 - RNA, 20 nt, Artificial Sequence
  HTT spacer sequence TTCN PAM
aggucucucucauccuaggc

SEQ ID NO: 36970 - RNA, 20 nt, Artificial Sequence
  HTT spacer sequence TTCN PAM
guggagcugcccucuuguca

SEQ ID NO: 36971 - RNA, 20 nt, Artificial Sequence
  HTT spacer sequence TTCN PAM
cugucuagccacuuaauuga

SEQ ID NO: 36972 - RNA, 20 nt, Artificial Sequence
  HTT spacer sequence TTCN PAM
ucgaguugcuguccaugguc

SEQ ID NO: 36973 - RNA, 20 nt, Artificial Sequence
  HTT spacer sequence TTCN PAM
cuguguuucugccucucucc

SEQ ID NO: 36974 - RNA, 20 nt, Artificial Sequence
  HTT spacer sequence TTCN PAM
gccucucuccuuggccuugg

SEQ ID NO: 36975 - RNA, 20 nt, Artificial Sequence
  HTT spacer sequence TTCN PAM
cuugcugguccuuguagucc

SEQ ID NO: 36976 - RNA, 20 nt, Artificial Sequence
  HTT spacer sequence TTCN PAM
cgacacgggacuuguccugc

SEQ ID NO: 36977 - RNA, 20 nt, Artificial Sequence
  HTT spacer sequence TTCN PAM
auuuuaagugcaagucugag

SEQ ID NO: 36978 - RNA, 20 nt, Artificial Sequence
  HTT spacer sequence TTCN PAM
uguuaauuagaucauuaggg

SEQ ID NO: 36979 - RNA, 20 nt, Artificial Sequence
  HTT spacer sequence TTCN PAM
gaaucccagcaucauaguau

SEQ ID NO: 36980 - RNA, 20 nt, Artificial Sequence
  HTT spacer sequence TTCN PAM
gaacaucccuaaugaucuaa

SEQ ID NO: 36981 - RNA, 20 nt, Artificial Sequence
  HTT spacer sequence TTCN PAM
uccucccgcuaccccaggaa

SEQ ID NO: 36982 - RNA, 20 nt, Artificial Sequence
  HTT spacer sequence TTCN PAM
ugggguagcgggaggaggaa

SEQ ID NO: 36983 - RNA, 20 nt, Artificial Sequence
  HTT spacer sequence TTCN PAM
accugaacuucccuaauagg

SEQ ID NO: 36984 - RNA, 20 nt, Artificial Sequence
  HTT spacer sequence TTCN PAM
gguggaagaugagacggacu

SEQ ID NO: 36985 - RNA, 20 nt, Artificial Sequence
  HTT spacer sequence TTCN PAM
cuaauaggcuccagcagcug

SEQ ID NO: 36986 - RNA, 20 nt, Artificial Sequence
  HTT spacer sequence TTCN PAM
uccaugccuugugcagugcu

SEQ ID NO: 36987 - RNA, 20 nt, Artificial Sequence
  HTT spacer sequence TTCN PAM
ccuguuugcuccuuauuaca

SEQ ID NO: 36988 - RNA, 20 nt, Artificial Sequence
  HTT spacer sequence TTCN PAM
cagggcuguaauaaggagca

SEQ ID NO: 36989 - RNA, 20 nt, Artificial Sequence
  HTT spacer sequence TTCN PAM
aucuuacaccuaaggaagcu

SEQ ID NO: 36990 - RNA, 20 nt, Artificial Sequence
  HTT spacer sequence TTCN PAM
uuagguguaagauggaauua

SEQ ID NO: 36991 - RNA, 20 nt, Artificial Sequence
  HTT spacer sequence TTCN PAM
gaucguggcucuacugucua

SEQ ID NO: 36992 - RNA, 20 nt, Artificial Sequence
  HTT spacer sequence TTCN PAM
gagccuguguugacacucag

SEQ ID NO: 36993 - RNA, 20 nt, Artificial Sequence
  HTT spacer sequence TTCN PAM
agguggcugagugucaacac

SEQ ID NO: 36994 - RNA, 20 nt, Artificial Sequence
  HTT spacer sequence TTCN PAM
auuaccuguucaaaaccccu

SEQ ID NO: 36995 - RNA, 20 nt, Artificial Sequence
  HTT spacer sequence TTCN PAM
aaaccccuacaucccggguc

SEQ ID NO: 36996 - RNA, 20 nt, Artificial Sequence
  HTT spacer sequence TTCN PAM
uugaaggcagugcaugccuc

SEQ ID NO: 36997 - RNA, 20 nt, Artificial Sequence
  HTT spacer sequence TTCN PAM
aggaagaugcagccaggcca

SEQ ID NO: 36998 - RNA, 20 nt, Artificial Sequence
  HTT spacer sequence TTCN PAM
cucagggggcccaugcagga

SEQ ID NO: 36999 - RNA, 20 nt, Artificial Sequence
  HTT spacer sequence TTCN PAM
ugcaugggcccccugaguga

SEQ ID NO: 37000 - RNA, 20 nt, Artificial Sequence
  HTT spacer sequence TTCN PAM
guggggcccucuguuccugc

SEQ ID NO: 37001 - RNA, 20 nt, Artificial Sequence
  HTT spacer sequence TTCN PAM
gcacuggccucauccuucug

SEQ ID NO: 37002 - RNA, 20 nt, Artificial Sequence
  HTT spacer sequence TTCN PAM
uggucagcauuguccccucc

SEQ ID NO: 37003 - RNA, 20 nt, Artificial Sequence
  HTT spacer sequence TTCN PAM
cuacacuugcuuccugguca

SEQ ID NO: 37004 - RNA, 20 nt, Artificial Sequence
  HTT spacer sequence TTCN PAM
ugggauuucucuacacuugc

SEQ ID NO: 37005 - RNA, 20 nt, Artificial Sequence
  HTT spacer sequence TTCN PAM
aaugccuugucucuggcucc

SEQ ID NO: 37006 - RNA, 20 nt, Artificial Sequence
  HTT spacer sequence TTCN PAM
cugagugugcugcuucuguu

SEQ ID NO: 37007 - RNA, 20 nt, Artificial Sequence
  HTT spacer sequence TTCN PAM
guuagcucgcuuccuugguc

SEQ ID NO: 37008 - RNA, 20 nt, Artificial Sequence
  HTT spacer sequence TTCN PAM
uuggucucagguuauaguuu

SEQ ID NO: 37009 - RNA, 20 nt, Artificial Sequence
  HTT spacer sequence TTCN PAM
cuuuggggauguguugauuu

SEQ ID NO: 37010 - RNA, 20 nt, Artificial Sequence
  HTT spacer sequence TTCN PAM
agcaauucuugugcucccgc

SEQ ID NO: 37011 - RNA, 20 nt, Artificial Sequence
  HTT spacer sequence TTCN PAM
ugugcucccgccucccaaau

SEQ ID NO: 37012 - RNA, 20 nt, Artificial Sequence
  HTT spacer sequence TTCN PAM
agaccagccugaccaacaug

SEQ ID NO: 37013 - RNA, 20 nt, Artificial Sequence
  HTT spacer sequence TTCN PAM
ggccgggugugguggcucac

SEQ ID NO: 37014 - RNA, 20 nt, Artificial Sequence
  HTT spacer sequence TTCN PAM
gauuuaaauuucaggccggg

SEQ ID NO: 37015 - RNA, 20 nt, Artificial Sequence
  HTT spacer sequence TTCN PAM
cuguuucccaagucuugcug

SEQ ID NO: 37016 - RNA, 20 nt, Artificial Sequence
  HTT spacer sequence TTCN PAM
caagucuugcugccucuccc

SEQ ID NO: 37017 - RNA, 20 nt, Artificial Sequence
  HTT spacer sequence TTCN PAM
auccucuccuuuggauaaac

SEQ ID NO: 37018 - RNA, 20 nt, Artificial Sequence
  HTT spacer sequence TTCN PAM
uucuauccucuccuuuggau

SEQ ID NO: 37019 - RNA, 20 nt, Artificial Sequence
  HTT spacer sequence TTCN PAM
uggagcccugagaaggaugc

SEQ ID NO: 37020 - RNA, 20 nt, Artificial Sequence
  HTT spacer sequence TTCN PAM
cagggcuccaggaaucauga

SEQ ID NO: 37021 - RNA, 20 nt, Artificial Sequence
  HTT spacer sequence TTCN PAM
ccacagcauccuucucaggg

SEQ ID NO: 37022 - RNA, 20 nt, Artificial Sequence
  HTT spacer sequence TTCN PAM
accggcaaauuucuccacag

SEQ ID NO: 37023 - RNA, 20 nt, Artificial Sequence
  HTT spacer sequence TTCN PAM
caccuggccuccuucagcau

SEQ ID NO: 37024 - RNA, 20 nt, Artificial Sequence
  HTT spacer sequence TTCN PAM
gcauuucugucccucagucc

SEQ ID NO: 37025 - RNA, 20 nt, Artificial Sequence
  HTT spacer sequence TTCN PAM
gucccucaguccuuagcaag

SEQ ID NO: 37026 - RNA, 20 nt, Artificial Sequence
  HTT spacer sequence TTCN PAM
ugccuguguagcuguggcuc

SEQ ID NO: 37027 - RNA, 20 nt, Artificial Sequence
  HTT spacer sequence TTCN PAM
aggcgcugaguguucccuga

SEQ ID NO: 37028 - RNA, 20 nt, Artificial Sequence
  HTT spacer sequence TTCN PAM
cugacuccuucuccaggagc

SEQ ID NO: 37029 - RNA, 20 nt, Artificial Sequence
  HTT spacer sequence TTCN PAM
ccaggagcuguguucagacu

SEQ ID NO: 37030 - RNA, 20 nt, Artificial Sequence
  HTT spacer sequence TTCN PAM
gacuuucgcagcucuuggcu

SEQ ID NO: 37031 - RNA, 20 nt, Artificial Sequence
  HTT spacer sequence TTCN PAM
cagcucuuggcuuggagcuc

SEQ ID NO: 37032 - RNA, 20 nt, Artificial Sequence
  HTT spacer sequence TTCN PAM
uccucucucacugucgaccu

SEQ ID NO: 37033 - RNA, 20 nt, Artificial Sequence
  HTT spacer sequence TTCN PAM
ugaccaguccauuaaauaag

SEQ ID NO: 37034 - RNA, 20 nt, Artificial Sequence
  HTT spacer sequence TTCN PAM
agaccagccuggccaacaug

SEQ ID NO: 37035 - RNA, 20 nt, Artificial Sequence
  HTT spacer sequence TTCN PAM
ccauguuggccaggcugguc

SEQ ID NO: 37036 - RNA, 20 nt, Artificial Sequence
  HTT spacer sequence TTCN PAM
ccugccucagccucccaagu

SEQ ID NO: 37037 - RNA, 20 nt, Artificial Sequence
  HTT spacer sequence TTCN PAM
agcuguucuccugccucagc

SEQ ID NO: 37038 - RNA, 20 nt, Artificial Sequence
  HTT spacer sequence TTCN PAM
gguuucaagcuguucuccug

SEQ ID NO: 37039 - RNA, 20 nt, Artificial Sequence
  HTT spacer sequence TTCN PAM
gcuuagaaaaaucagaauuu

SEQ ID NO: 37040 - RNA, 20 nt, Artificial Sequence
  HTT spacer sequence TTCN PAM
aagcagaaacagauauccua

SEQ ID NO: 37041 - RNA, 20 nt, Artificial Sequence
  HTT spacer sequence TTCN PAM
gauuuuucuaagcagaaaca

SEQ ID NO: 37042 - RNA, 20 nt, Artificial Sequence
  HTT spacer sequence TTCN PAM
aaaugccagguguucugaau

SEQ ID NO: 37043 - RNA, 20 nt, Artificial Sequence
  HTT spacer sequence TTCN PAM
gaauacguaaguaugggaga

SEQ ID NO: 37044 - RNA, 20 nt, Artificial Sequence
  HTT spacer sequence TTCN PAM
gaacaccuggcauuuagaaa

SEQ ID NO: 37045 - RNA, 20 nt, Artificial Sequence
  HTT spacer sequence TTCN PAM
uuuuuauguaaaaucuucgc

SEQ ID NO: 37046 - RNA, 20 nt, Artificial Sequence
  HTT spacer sequence TTCN PAM
cguagccauguggcacugga

SEQ ID NO: 37047 - RNA, 20 nt, Artificial Sequence
  HTT spacer sequence TTCN PAM
ucucgguccagugccacaug

SEQ ID NO: 37048 - RNA, 20 nt, Artificial Sequence
  HTT spacer sequence TTCN PAM
ccuuaacuuuguuucuagga

SEQ ID NO: 37049 - RNA, 20 nt, Artificial Sequence
  HTT spacer sequence TTCN PAM
aggaauguuccggagaauca

SEQ ID NO: 37050 - RNA, 20 nt, Artificial Sequence
  HTT spacer sequence TTCN PAM
uagaaacaaaguuaaggaga

SEQ ID NO: 37051 - RNA, 20 nt, Artificial Sequence
  HTT spacer sequence TTCN PAM
ggagaaucacagcagcugcc

SEQ ID NO: 37052 - RNA, 20 nt, Artificial Sequence
  HTT spacer sequence TTCN PAM
ccggaacauuccuagaaaca

SEQ ID NO: 37053 - RNA, 20 nt, Artificial Sequence
  HTT spacer sequence TTCN PAM
gcagugauggcuguggcggc

SEQ ID NO: 37054 - RNA, 20 nt, Artificial Sequence
  HTT spacer sequence TTCN PAM
acacccuggacagcuugaac

SEQ ID NO: 37055 - RNA, 20 nt, Artificial Sequence
  HTT spacer sequence TTCN PAM
agcuguccaggguguagaaa

SEQ ID NO: 37056 - RNA, 20 nt, Artificial Sequence
  HTT spacer sequence TTCN PAM
augaucaccacccacccggc

SEQ ID NO: 37057 - RNA, 20 nt, Artificial Sequence
  HTT spacer sequence TTCN PAM
gcccaccagcgguagucggu

SEQ ID NO: 37058 - RNA, 20 nt, Artificial Sequence
  HTT spacer sequence TTCN PAM
gggucugcugcacuucugcc

SEQ ID NO: 37059 - RNA, 20 nt, Artificial Sequence
  HTT spacer sequence TTCN PAM
uaaugccccacagcccaggg

SEQ ID NO: 37060 - RNA, 20 nt, Artificial Sequence
  HTT spacer sequence TTCN PAM
uuuuccauuuuuugugaggg

SEQ ID NO: 37061 - RNA, 20 nt, Artificial Sequence
  HTT spacer sequence TTCN PAM
auuuuuugugagggcuugug

SEQ ID NO: 37062 - RNA, 20 nt, Artificial Sequence
  HTT spacer sequence TTCN PAM
caagcccucacaaaaaaugg

SEQ ID NO: 37063 - RNA, 20 nt, Artificial Sequence
  HTT spacer sequence TTCN PAM
gcugcauauuaauauuccuu

SEQ ID NO: 37064 - RNA, 20 nt, Artificial Sequence
  HTT spacer sequence TTCN PAM
uuucauggacagcauauuau

SEQ ID NO: 37065 - RNA, 20 nt, Artificial Sequence
  HTT spacer sequence TTCN PAM
uggacagcauauuauuggga

SEQ ID NO: 37066 - RNA, 20 nt, Artificial Sequence
  HTT spacer sequence TTCN PAM
aaauagcaguugcuuucuaa

SEQ ID NO: 37067 - RNA, 20 nt, Artificial Sequence
  HTT spacer sequence TTCN PAM
aaaugcgauuuucuuuggca

SEQ ID NO: 37068 - RNA, 20 nt, Artificial Sequence
  HTT spacer sequence TTCN PAM
uuggcagguucuuugacacc

SEQ ID NO: 37069 - RNA, 20 nt, Artificial Sequence
  HTT spacer sequence TTCN PAM
uugacaccauugcaucuugu

SEQ ID NO: 37070 - RNA, 20 nt, Artificial Sequence
  HTT spacer sequence TTCN PAM
aguccuuaaauugguuccau

SEQ ID NO: 37071 - RNA, 20 nt, Artificial Sequence
  HTT spacer sequence TTCN PAM
auagccagacauguugcaau

SEQ ID NO: 37072 - RNA, 20 nt, Artificial Sequence
  HTT spacer sequence TTCN PAM
gguuauccuuagauaaugaa

SEQ ID NO: 37073 - RNA, 20 nt, Artificial Sequence
  HTT spacer sequence TTCN PAM
uuaucuaaggauaaccagaa

SEQ ID NO: 37074 - RNA, 20 nt, Artificial Sequence
  HTT spacer sequence TTCN PAM
aaaccucuuggaaauguuau

SEQ ID NO: 37075 - RNA, 20 nt, Artificial Sequence
  HTT spacer sequence TTCN PAM
aagagguuuugaaauuugcu

SEQ ID NO: 37076 - RNA, 20 nt, Artificial Sequence
  HTT spacer sequence TTCN PAM
aaaaggcuuacuaagguucu

SEQ ID NO: 37077 - RNA, 20 nt, Artificial Sequence
  HTT spacer sequence TTCN PAM
cguuauggguggcccucuuu

SEQ ID NO: 37078 - RNA, 20 nt, Artificial Sequence
  HTT spacer sequence TTCN PAM
ggcuuaagcuccauuucuag

SEQ ID NO: 37079 - RNA, 20 nt, Artificial Sequence
  HTT spacer sequence TTCN PAM
aggugcuccaacacuccauu

SEQ ID NO: 37080 - RNA, 20 nt, Artificial Sequence
  HTT spacer sequence TTCN PAM
auacauauacaaauaaugga

SEQ ID NO: 37081 - RNA, 20 nt, Artificial Sequence
  HTT spacer sequence TTCN PAM
gcugggcgggggccaggguu

SEQ ID NO: 37082 - RNA, 20 nt, Artificial Sequence
  HTT spacer sequence TTCN PAM
ggaaggcucaagaucccacg

SEQ ID NO: 37083 - RNA, 20 nt, Artificial Sequence
  HTT spacer sequence TTCN PAM
agaaauacugugcugaggau

SEQ ID NO: 37084 - RNA, 20 nt, Artificial Sequence
  HTT spacer sequence TTCN PAM
ccagcgugggaucuugagcc

SEQ ID NO: 37085 - RNA, 20 nt, Artificial Sequence
  HTT spacer sequence TTCN PAM
uuuccccagcgugggaucuu

SEQ ID NO: 37086 - RNA, 20 nt, Artificial Sequence
  HTT spacer sequence TTCN PAM
ggagacaaaagagggcaggu

SEQ ID NO: 37087 - RNA, 20 nt, Artificial Sequence
  HTT spacer sequence TTCN PAM
uggcacucagcuggaaaguc

SEQ ID NO: 37088 - RNA, 20 nt, Artificial Sequence
  HTT spacer sequence TTCN PAM
agcugagugccaugaacugg

SEQ ID NO: 37089 - RNA, 20 nt, Artificial Sequence
  HTT spacer sequence TTCN PAM
uaaccauccacucugugccg

SEQ ID NO: 37090 - RNA, 20 nt, Artificial Sequence
  HTT spacer sequence TTCN PAM
guuggaggagacagaccagu

SEQ ID NO: 37091 - RNA, 20 nt, Artificial Sequence
  HTT spacer sequence TTCN PAM
aaugucgucacuggucuguc

SEQ ID NO: 37092 - RNA, 20 nt, Artificial Sequence
  HTT spacer sequence TTCN PAM
gucuccugcccccacagugc

SEQ ID NO: 37093 - RNA, 20 nt, Artificial Sequence
  HTT spacer sequence TTCN PAM
gugcugcuuuaacgugcaua

SEQ ID NO: 37094 - RNA, 20 nt, Artificial Sequence
  HTT spacer sequence TTCN PAM
augcacguuaaagcagcaca

SEQ ID NO: 37095 - RNA, 20 nt, Artificial Sequence
  HTT spacer sequence TTCN PAM
gcagaucacuccuuuucuga

SEQ ID NO: 37096 - RNA, 20 nt, Artificial Sequence
  HTT spacer sequence TTCN PAM
gacagaugggccugcuuacu

SEQ ID NO: 37097 - RNA, 20 nt, Artificial Sequence
  HTT spacer sequence TTCN PAM
gauauaacaucagaguaagc

SEQ ID NO: 37098 - RNA, 20 nt, Artificial Sequence
  HTT spacer sequence TTCN PAM
gagcuuucugauauaacauc

SEQ ID NO: 37099 - RNA, 20 nt, Artificial Sequence
  HTT spacer sequence TTCN PAM
cagauucagagcuuucugau

SEQ ID NO: 37100 - RNA, 20 nt, Artificial Sequence
  HTT spacer sequence TTCN PAM
ggggacacaauucccagauu

SEQ ID NO: 37101 - RNA, 20 nt, Artificial Sequence
  HTT spacer sequence TTCN PAM
guuacuccaauucaggggac

SEQ ID NO: 37102 - RNA, 20 nt, Artificial Sequence
  HTT spacer sequence TTCN PAM
uuuaaacacucaucaucuaa

SEQ ID NO: 37103 - RNA, 20 nt, Artificial Sequence
  HTT spacer sequence TTCN PAM
aaacuaaauuuaccuuuggu

SEQ ID NO: 37104 - RNA, 20 nt, Artificial Sequence
  HTT spacer sequence TTCN PAM
gcaagcgucuucauucagcc

SEQ ID NO: 37105 - RNA, 20 nt, Artificial Sequence
  HTT spacer sequence TTCN PAM
uucagcccucugagggcaaa

SEQ ID NO: 37106 - RNA, 20 nt, Artificial Sequence
  HTT spacer sequence TTCN PAM
gcccucugagggcaaacuac

SEQ ID NO: 37107 - RNA, 20 nt, Artificial Sequence
  HTT spacer sequence TTCN PAM
gugacuguuucgugaccccc

SEQ ID NO: 37108 - RNA, 20 nt, Artificial Sequence
  HTT spacer sequence TTCN PAM
ugacccccucugauccaguu

SEQ ID NO: 37109 - RNA, 20 nt, Artificial Sequence
  HTT spacer sequence TTCN PAM
uuuauaaccuucuguauugu

SEQ ID NO: 37110 - RNA, 20 nt, Artificial Sequence
  HTT spacer sequence TTCN PAM
guauuguuccuucuauuauc

SEQ ID NO: 37111 - RNA, 20 nt, Artificial Sequence
  HTT spacer sequence TTCN PAM
uucuauuauccugaaauaac

SEQ ID NO: 37112 - RNA, 20 nt, Artificial Sequence
  HTT spacer sequence TTCN PAM
auuauccugaaauaacauua

SEQ ID NO: 37113 - RNA, 20 nt, Artificial Sequence
  HTT spacer sequence TTCN PAM
ggauaauagaaggaacaaua

SEQ ID NO: 37114 - RNA, 20 nt, Artificial Sequence
  HTT spacer sequence TTCN PAM
caaggugcugggauuauagg

SEQ ID NO: 37115 - RNA, 20 nt, Artificial Sequence
  HTT spacer sequence TTCN PAM
agaccagccuggccaacaug

SEQ ID NO: 37116 - RNA, 20 nt, Artificial Sequence
  HTT spacer sequence TTCN PAM
ucauguuggccaggcugguc

SEQ ID NO: 37117 - RNA, 20 nt, Artificial Sequence
  HTT spacer sequence TTCN PAM
guagagacagcauuucauca

SEQ ID NO: 37118 - RNA, 20 nt, Artificial Sequence
  HTT spacer sequence TTCN PAM
gaguagcagggacuacaggc

SEQ ID NO: 37119 - RNA, 20 nt, Artificial Sequence
  HTT spacer sequence TTCN PAM
cccgccucagccuucugagu

SEQ ID NO: 37120 - RNA, 20 nt, Artificial Sequence
  HTT spacer sequence TTCN PAM
agcgauucucccgccucagc

SEQ ID NO: 37121 - RNA, 20 nt, Artificial Sequence
  HTT spacer sequence TTCN PAM
uccuagguucaagcgauucu

SEQ ID NO: 37122 - RNA, 20 nt, Artificial Sequence
  HTT spacer sequence TTCN PAM
aaaaauaucguucuuuaaug

SEQ ID NO: 37123 - RNA, 20 nt, Artificial Sequence
  HTT spacer sequence TTCN PAM
uuaaugguaauguaaaggua

SEQ ID NO: 37124 - RNA, 20 nt, Artificial Sequence
  HTT spacer sequence TTCN PAM
accacggggacaccuuagac

SEQ ID NO: 37125 - RNA, 20 nt, Artificial Sequence
  HTT spacer sequence TTCN PAM
uuccaccacggggacaccuu

SEQ ID NO: 37126 - RNA, 20 nt, Artificial Sequence
  HTT spacer sequence TTCN PAM
gguuuaaaccccugcucuua

SEQ ID NO: 37127 - RNA, 20 nt, Artificial Sequence
  HTT spacer sequence TTCN PAM
agcuguggguggugggggau

SEQ ID NO: 37128 - RNA, 20 nt, Artificial Sequence
  HTT spacer sequence TTCN PAM
augagaugagaaaaaugaau

SEQ ID NO: 37129 - RNA, 20 nt, Artificial Sequence
  HTT spacer sequence TTCN PAM
caucucauggaaauaaaaag

SEQ ID NO: 37130 - RNA, 20 nt, Artificial Sequence
  HTT spacer sequence TTCN PAM
uuuuucucaucucauggaaa

SEQ ID NO: 37131 - RNA, 20 nt, Artificial Sequence
  HTT spacer sequence TTCN PAM
aguaauucauuuuucucauc

SEQ ID NO: 37132 - RNA, 20 nt, Artificial Sequence
  HTT spacer sequence TTCN PAM
cacuucuaguaauucauuuu

SEQ ID NO: 37133 - RNA, 20 nt, Artificial Sequence
  HTT spacer sequence TTCN PAM
gcaacuggauacagcaauuu

SEQ ID NO: 37134 - RNA, 20 nt, Artificial Sequence
  HTT spacer sequence TTCN PAM
ugcugcuuacucuugacccu

SEQ ID NO: 37135 - RNA, 20 nt, Artificial Sequence
  HTT spacer sequence TTCN PAM
cucucaaucugucuuaccuc

SEQ ID NO: 37136 - RNA, 20 nt, Artificial Sequence
  HTT spacer sequence TTCN PAM
ccaagagguaagacagauug

SEQ ID NO: 37137 - RNA, 20 nt, Artificial Sequence
  HTT spacer sequence TTCN PAM
cagcucaucuuguucugagu

SEQ ID NO: 37138 - RNA, 20 nt, Artificial Sequence
  HTT spacer sequence TTCN PAM
gagucacccuagauuuggga

SEQ ID NO: 37139 - RNA, 20 nt, Artificial Sequence
  HTT spacer sequence TTCN PAM
uucgccaccaguaccgggcg

SEQ ID NO: 37140 - RNA, 20 nt, Artificial Sequence
  HTT spacer sequence TTCN PAM
ccaccaguaccgggcggugu

SEQ ID NO: 37141 - RNA, 20 nt, Artificial Sequence
  HTT spacer sequence TTCN PAM
gccccaauuuguagcagcac

SEQ ID NO: 37142 - RNA, 20 nt, Artificial Sequence
  HTT spacer sequence TTCN PAM
uuaugucuacugcucauauu

SEQ ID NO: 37143 - RNA, 20 nt, Artificial Sequence
  HTT spacer sequence TTCN PAM
aauaugagcaguagacauaa

SEQ ID NO: 37144 - RNA, 20 nt, Artificial Sequence
  HTT spacer sequence TTCN PAM
cuuucagaggcucauuaccc

SEQ ID NO: 37145 - RNA, 20 nt, Artificial Sequence
  HTT spacer sequence TTCN PAM
gaggcucauuacccuauagc

SEQ ID NO: 37146 - RNA, 20 nt, Artificial Sequence
  HTT spacer sequence TTCN PAM
cagugggccguccugccagc

SEQ ID NO: 37147 - RNA, 20 nt, Artificial Sequence
  HTT spacer sequence TTCN PAM
uguucguuaguuuucacauu

SEQ ID NO: 37148 - RNA, 20 nt, Artificial Sequence
  HTT spacer sequence TTCN PAM
uuaguuuucacauugacaca

SEQ ID NO: 37149 - RNA, 20 nt, Artificial Sequence
  HTT spacer sequence TTCN PAM
cauugacacauaauuuacaa

SEQ ID NO: 37150 - RNA, 20 nt, Artificial Sequence
  HTT spacer sequence TTCN PAM
aucaacuguagucaguaaca

SEQ ID NO: 37151 - RNA, 20 nt, Artificial Sequence
  HTT spacer sequence TTCN PAM
aacaguucccucuuccucug

SEQ ID NO: 37152 - RNA, 20 nt, Artificial Sequence
  HTT spacer sequence TTCN PAM
cucuuccucugccacauccu

SEQ ID NO: 37153 - RNA, 20 nt, Artificial Sequence
  HTT spacer sequence TTCN PAM
ucugccacauccugccccuc

SEQ ID NO: 37154 - RNA, 20 nt, Artificial Sequence
  HTT spacer sequence TTCN PAM
gcccauugcagaaggccaua

SEQ ID NO: 37155 - RNA, 20 nt, Artificial Sequence
  HTT spacer sequence TTCN PAM
gcaaugggcugaacagaggg

SEQ ID NO: 37156 - RNA, 20 nt, Artificial Sequence
  HTT spacer sequence TTCN PAM
auggccuucugcaaugggcu

SEQ ID NO: 37157 - RNA, 20 nt, Artificial Sequence
  HTT spacer sequence TTCN PAM
auuucuauggccuucugcaa

SEQ ID NO: 37158 - RNA, 20 nt, Artificial Sequence
  HTT spacer sequence TTCN PAM
gccucucaaaauacugggau

SEQ ID NO: 37159 - RNA, 20 nt, Artificial Sequence
  HTT spacer sequence TTCN PAM
agacuagccugggcugccua

SEQ ID NO: 37160 - RNA, 20 nt, Artificial Sequence
  HTT spacer sequence TTCN PAM
ggagauggggucuugcuagg

SEQ ID NO: 37161 - RNA, 20 nt, Artificial Sequence
  HTT spacer sequence TTCN PAM
gcugcuugggaggcugaggc

SEQ ID NO: 37162 - RNA, 20 nt, Artificial Sequence
  HTT spacer sequence TTCN PAM
ccagagacaacgucuugcug

SEQ ID NO: 37163 - RNA, 20 nt, Artificial Sequence
  HTT spacer sequence TTCN PAM
uuuuuccccagagacaacgu

SEQ ID NO: 37164 - RNA, 20 nt, Artificial Sequence
  HTT spacer sequence TTCN PAM
uucuuuuuuccccagagaca

SEQ ID NO: 37165 - RNA, 20 nt, Artificial Sequence
  HTT spacer sequence TTCN PAM
guuucuuucuuuuuucccca

SEQ ID NO: 37166 - RNA, 20 nt, Artificial Sequence
  HTT spacer sequence TTCN PAM
gagucuggccccuuucggug

SEQ ID NO: 37167 - RNA, 20 nt, Artificial Sequence
  HTT spacer sequence TTCN PAM
gugagcagugucuaaaguuc

SEQ ID NO: 37168 - RNA, 20 nt, Artificial Sequence
  HTT spacer sequence TTCN PAM
gucgcguguugcccacgcgu

SEQ ID NO: 37169 - RNA, 20 nt, Artificial Sequence
  HTT spacer sequence TTCN PAM
cuucaccaguugggaaacag

SEQ ID NO: 37170 - RNA, 20 nt, Artificial Sequence
  HTT spacer sequence TTCN PAM
ccaguugggaaacagagaaa

SEQ ID NO: 37171 - RNA, 20 nt, Artificial Sequence
  HTT spacer sequence TTCN PAM
caacuggugaagugaaaaca

SEQ ID NO: 37172 - RNA, 20 nt, Artificial Sequence
  HTT spacer sequence TTCN PAM
cuguuucccaacuggugaag

SEQ ID NO: 37173 - RNA, 20 nt, Artificial Sequence
  HTT spacer sequence TTCN PAM
acagauuuaaacuuuuuaaa

SEQ ID NO: 37174 - RNA, 20 nt, Artificial Sequence
  HTT spacer sequence TTCN PAM
cuucuaaauccugagggauu

SEQ ID NO: 37175 - RNA, 20 nt, Artificial Sequence
  HTT spacer sequence TTCN PAM
aaauccugagggauuacagg

SEQ ID NO: 37176 - RNA, 20 nt, Artificial Sequence
  HTT spacer sequence TTCN PAM
uguaaucccucaggauuuag

SEQ ID NO: 37177 - RNA, 20 nt, Artificial Sequence
  HTT spacer sequence TTCN PAM
gaauauucuuagcuugaugu

SEQ ID NO: 37178 - RNA, 20 nt, Artificial Sequence
  HTT spacer sequence TTCN PAM
gaaauacaacaacuuuuccu

SEQ ID NO: 37179 - RNA, 20 nt, Artificial Sequence
  HTT spacer sequence TTCN PAM
uagcuugaugugaccucugu

SEQ ID NO: 37180 - RNA, 20 nt, Artificial Sequence
  HTT spacer sequence TTCN PAM
cauugcggcaaagggccuua

SEQ ID NO: 37181 - RNA, 20 nt, Artificial Sequence
  HTT spacer sequence TTCN PAM
gggucugaccgagcgacguc

SEQ ID NO: 37182 - RNA, 20 nt, Artificial Sequence
  HTT spacer sequence TTCN PAM
cacguauucaaaaagaaaaa

SEQ ID NO: 37183 - RNA, 20 nt, Artificial Sequence
  HTT spacer sequence TTCN PAM
aaaagaaaaaaacaauaaag

SEQ ID NO: 37184 - RNA, 20 nt, Artificial Sequence
  HTT spacer sequence TTCN PAM
uuuugaauacgugggaauua

SEQ ID NO: 37185 - RNA, 20 nt, Artificial Sequence
  HTT spacer sequence TTCN PAM
cacuuuauuguuuuuuucuu

SEQ ID NO: 37186 - RNA, 20 nt, Artificial Sequence
  HTT spacer sequence TTCN PAM
cucuacacugacuucucacu

SEQ ID NO: 37187 - RNA, 20 nt, Artificial Sequence
  HTT spacer sequence TTCN PAM
ccacuaacacagguuauuuc

SEQ ID NO: 37188 - RNA, 20 nt, Artificial Sequence
  HTT spacer sequence TTCN PAM
uccccacuaacacagguuau

SEQ ID NO: 37189 - RNA, 20 nt, Artificial Sequence
  HTT spacer sequence TTCN PAM
auaacguauaacaucaacau

SEQ ID NO: 37190 - RNA, 20 nt, Artificial Sequence
  HTT spacer sequence TTCN PAM
uugggaaacgaacaguaaaa

SEQ ID NO: 37191 - RNA, 20 nt, Artificial Sequence
  HTT spacer sequence TTCN PAM
caaugaaacaucaccacucu

SEQ ID NO: 37192 - RNA, 20 nt, Artificial Sequence
  HTT spacer sequence TTCN PAM
uuucccaaugaaacaucacc

SEQ ID NO: 37193 - RNA, 20 nt, Artificial Sequence
  HTT spacer sequence TTCN PAM
uguuuuacuguucguuuccc

SEQ ID NO: 37194 - RNA, 20 nt, Artificial Sequence
  HTT spacer sequence TTCN PAM
uucuggcaguuggcaacuuu

SEQ ID NO: 37195 - RNA, 20 nt, Artificial Sequence
  HTT spacer sequence TTCN PAM
ggcaguuggcaacuuucacg

SEQ ID NO: 37196 - RNA, 20 nt, Artificial Sequence
  HTT spacer sequence TTCN PAM
cggcagauggagaauuucaa

SEQ ID NO: 37197 - RNA, 20 nt, Artificial Sequence
  HTT spacer sequence TTCN PAM
ccaucugccgugaaaguugc

SEQ ID NO: 37198 - RNA, 20 nt, Artificial Sequence
  HTT spacer sequence TTCN PAM
aaagcaauugcucaauuauc

SEQ ID NO: 37199 - RNA, 20 nt, Artificial Sequence
  HTT spacer sequence TTCN PAM
gaaauaaaggugcugauuga

SEQ ID NO: 37200 - RNA, 20 nt, Artificial Sequence
  HTT spacer sequence TTCN PAM
gaacucacacuggcuauguu

SEQ ID NO: 37201 - RNA, 20 nt, Artificial Sequence
  HTT spacer sequence TTCN PAM
aucagcaccuuuauuucaga

SEQ ID NO: 37202 - RNA, 20 nt, Artificial Sequence
  HTT spacer sequence TTCN PAM
ggcaagcauuuuaauuuucu

SEQ ID NO: 37203 - RNA, 20 nt, Artificial Sequence
  HTT spacer sequence TTCN PAM
gccuguuaaauucuguuuuc

SEQ ID NO: 37204 - RNA, 20 nt, Artificial Sequence
  HTT spacer sequence TTCN PAM
guuuucuuuaguuuuucaua

SEQ ID NO: 37205 - RNA, 20 nt, Artificial Sequence
  HTT spacer sequence TTCN PAM
uuaguuuuucauaugugguu

SEQ ID NO: 37206 - RNA, 20 nt, Artificial Sequence
  HTT spacer sequence TTCN PAM
uaugugguuuauuguagcuu

SEQ ID NO: 37207 - RNA, 20 nt, Artificial Sequence
  HTT spacer sequence TTCN PAM
uaagcuacaauaaaccacau

SEQ ID NO: 37208 - RNA, 20 nt, Artificial Sequence
  HTT spacer sequence TTCN PAM
gauauggcaauauuuaaaac

SEQ ID NO: 37209 - RNA, 20 nt, Artificial Sequence
  HTT spacer sequence TTCN PAM
aaaacagacaaguuguuuua

SEQ ID NO: 37210 - RNA, 20 nt, Artificial Sequence
  HTT spacer sequence TTCN PAM
aguucuaaaacagacaaguu

SEQ ID NO: 37211 - RNA, 20 nt, Artificial Sequence
  HTT spacer sequence TTCN PAM
guauuuugcaaauaagcuca

SEQ ID NO: 37212 - RNA, 20 nt, Artificial Sequence
  HTT spacer sequence TTCN PAM
ggauggcagugagcuuauuu

SEQ ID NO: 37213 - RNA, 20 nt, Artificial Sequence
  HTT spacer sequence TTCN PAM
agaagacacagucuguccag

SEQ ID NO: 37214 - RNA, 20 nt, Artificial Sequence
  HTT spacer sequence TTCN PAM
agaaggagcaacagaugcau

SEQ ID NO: 37215 - RNA, 20 nt, Artificial Sequence
  HTT spacer sequence TTCN PAM
ccagacaucuggggacuaag

SEQ ID NO: 37216 - RNA, 20 nt, Artificial Sequence
  HTT spacer sequence TTCN PAM
gacuuggcagccaaacuugg

SEQ ID NO: 37217 - RNA, 20 nt, Artificial Sequence
  HTT spacer sequence TTCN PAM
aaguuuggcugccaagucag

SEQ ID NO: 37218 - RNA, 20 nt, Artificial Sequence
  HTT spacer sequence TTCN PAM
cuauugcacauuccaaguuu

SEQ ID NO: 37219 - RNA, 20 nt, Artificial Sequence
  HTT spacer sequence TTCN PAM
uacuauuucucuauugcaca

SEQ ID NO: 37220 - RNA, 20 nt, Artificial Sequence
  HTT spacer sequence TTCN PAM
cuucugugauuaugucguaa

SEQ ID NO: 37221 - RNA, 20 nt, Artificial Sequence
  HTT spacer sequence TTCN PAM
gugauuaugucguaaguuug

SEQ ID NO: 37222 - RNA, 20 nt, Artificial Sequence
  HTT spacer sequence TTCN PAM
aacuuacgacauaaucacag

SEQ ID NO: 37223 - RNA, 20 nt, Artificial Sequence
  HTT spacer sequence TTCN PAM
ccugguccccaccucccuca

SEQ ID NO: 37224 - RNA, 20 nt, Artificial Sequence
  HTT spacer sequence TTCN PAM
agaggguccaugcaaguguc

SEQ ID NO: 37225 - RNA, 20 nt, Artificial Sequence
  HTT spacer sequence TTCN PAM
auggagcuuggcaggacacc

SEQ ID NO: 37226 - RNA, 20 nt, Artificial Sequence
  HTT spacer sequence TTCN PAM
agauuuaguuucgauggagc

SEQ ID NO: 37227 - RNA, 20 nt, Artificial Sequence
  HTT spacer sequence TTCN PAM
uucuagauuuaguuucgaug

SEQ ID NO: 37228 - RNA, 20 nt, Artificial Sequence
  HTT spacer sequence TTCN PAM
gcugugacauauaauuggag

SEQ ID NO: 37229 - RNA, 20 nt, Artificial Sequence
  HTT spacer sequence TTCN PAM
agucacuggauucuaaguug

SEQ ID NO: 37230 - RNA, 20 nt, Artificial Sequence
  HTT spacer sequence TTCN PAM
aaguuggacugugagaguuu

SEQ ID NO: 37231 - RNA, 20 nt, Artificial Sequence
  HTT spacer sequence TTCN PAM
cucaaauuaacaaacauacc

SEQ ID NO: 37232 - RNA, 20 nt, Artificial Sequence
  HTT spacer sequence TTCN PAM
auugcuucccucaaauuaac

SEQ ID NO: 37233 - RNA, 20 nt, Artificial Sequence
  HTT spacer sequence TTCN PAM
gauuuuaaauuuuuuuaaaa

SEQ ID NO: 37234 - RNA, 20 nt, Artificial Sequence
  HTT spacer sequence TTCN PAM
agcaacucgagaggcugagg

SEQ ID NO: 37235 - RNA, 20 nt, Artificial Sequence
  HTT spacer sequence TTCN PAM
uaccucagccucucgaguug

SEQ ID NO: 37236 - RNA, 20 nt, Artificial Sequence
  HTT spacer sequence TTCN PAM
caaagagcugugauuacagg

SEQ ID NO: 37237 - RNA, 20 nt, Artificial Sequence
  HTT spacer sequence TTCN PAM
agaccagccuggcaacacag

SEQ ID NO: 37238 - RNA, 20 nt, Artificial Sequence
  HTT spacer sequence TTCN PAM
cuguguugccaggcuggucu

SEQ ID NO: 37239 - RNA, 20 nt, Artificial Sequence
  HTT spacer sequence TTCN PAM
uuuuuugguagaggcagggu

SEQ ID NO: 37240 - RNA, 20 nt, Artificial Sequence
  HTT spacer sequence TTCN PAM
ucucuuucuuuuuuugguag

SEQ ID NO: 37241 - RNA, 20 nt, Artificial Sequence
  HTT spacer sequence TTCN PAM
uccucucuuucuuuuuuugg

SEQ ID NO: 37242 - RNA, 20 nt, Artificial Sequence
  HTT spacer sequence TTCN PAM
uucuuccucucuuucuuuuu

SEQ ID NO: 37243 - RNA, 20 nt, Artificial Sequence
  HTT spacer sequence TTCN PAM
cagucucucagguggcuggg

SEQ ID NO: 37244 - RNA, 20 nt, Artificial Sequence
  HTT spacer sequence TTCN PAM
gggcucaagcaauccucccu

SEQ ID NO: 37245 - RNA, 20 nt, Artificial Sequence
  HTT spacer sequence TTCN PAM
acaaauuaacuuaaaaaaau

SEQ ID NO: 37246 - RNA, 20 nt, Artificial Sequence
  HTT spacer sequence TTCN PAM
uugucacauuuuaugaugga

SEQ ID NO: 37247 - RNA, 20 nt, Artificial Sequence
  HTT spacer sequence TTCN PAM
uguuuaaaugccguucucuu

SEQ ID NO: 37248 - RNA, 20 nt, Artificial Sequence
  HTT spacer sequence TTCN PAM
cuuuaaagaaaaaaaaauaa

SEQ ID NO: 37249 - RNA, 20 nt, Artificial Sequence
  HTT spacer sequence TTCN PAM
uuaaagagaacggcauuuaa

SEQ ID NO: 37250 - RNA, 20 nt, Artificial Sequence
  HTT spacer sequence TTCN PAM
ccaugguaaauaugugaugc

SEQ ID NO: 37251 - RNA, 20 nt, Artificial Sequence
  HTT spacer sequence TTCN PAM
uccguuuauuuguuuuuuug

SEQ ID NO: 37252 - RNA, 20 nt, Artificial Sequence
  HTT spacer sequence TTCN PAM
auauuuauauuaaaaauauu

SEQ ID NO: 37253 - RNA, 20 nt, Artificial Sequence
  HTT spacer sequence TTCN PAM
uugucacaaacaugguaucu

SEQ ID NO: 37254 - RNA, 20 nt, Artificial Sequence
  HTT spacer sequence TTCN PAM
gaaucagaaaaggaagccga

SEQ ID NO: 37255 - RNA, 20 nt, Artificial Sequence
  HTT spacer sequence TTCN PAM
gaauauuuaacacuguuuug

SEQ ID NO: 37256 - RNA, 20 nt, Artificial Sequence
  HTT spacer sequence TTCN PAM
gauucagaauauuuaacacu

SEQ ID NO: 37257 - RNA, 20 nt, Artificial Sequence
  HTT spacer sequence TTCN PAM
uuuucugauucagaauauuu

SEQ ID NO: 37258 - RNA, 20 nt, Artificial Sequence
  HTT spacer sequence TTCN PAM
guuggagagucggcuuccuu

SEQ ID NO: 37259 - RNA, 20 nt, Artificial Sequence
  HTT spacer sequence TTCN PAM
ggugaugacaauuuauuaau

SEQ ID NO: 37260 - RNA, 20 nt, Artificial Sequence
  HTT spacer sequence TTCN PAM
cuauugaaguaguuuuucua

SEQ ID NO: 37261 - RNA, 20 nt, Artificial Sequence
  HTT spacer sequence TTCN PAM
auagagaaaguaaagcaaaa

SEQ ID NO: 37262 - RNA, 20 nt, Artificial Sequence
  HTT spacer sequence TTCN PAM
auuuuguucuacuuuuaagg

SEQ ID NO: 37263 - RNA, 20 nt, Artificial Sequence
  HTT spacer sequence TTCN PAM
acuuuuaaggauaauauaau

SEQ ID NO: 37264 - RNA, 20 nt, Artificial Sequence
  HTT spacer sequence TTCN PAM
cagaaauauaagaaaaaaga

SEQ ID NO: 37265 - RNA, 20 nt, Artificial Sequence
  HTT spacer sequence TTCN PAM
gugaaaaacagcauuauaaa

SEQ ID NO: 37266 - RNA, 20 nt, Artificial Sequence
  HTT spacer sequence TTCN PAM
uauauuucugugaaaaacag

SEQ ID NO: 37267 - RNA, 20 nt, Artificial Sequence
  HTT spacer sequence TTCN PAM
gauuuuuggauuugggauga

SEQ ID NO: 37268 - RNA, 20 nt, Artificial Sequence
  HTT spacer sequence TTCN PAM
gaagcuuuuugagugcugac

SEQ ID NO: 37269 - RNA, 20 nt, Artificial Sequence
  HTT spacer sequence TTCN PAM
gaauuuggagcauuuuggau

SEQ ID NO: 37270 - RNA, 20 nt, Artificial Sequence
  HTT spacer sequence TTCN PAM
aaggaaauguucauuggaag

SEQ ID NO: 37271 - RNA, 20 nt, Artificial Sequence
  HTT spacer sequence TTCN PAM
uuugaacauaaugucagcac

SEQ ID NO: 37272 - RNA, 20 nt, Artificial Sequence
  HTT spacer sequence TTCN PAM
uuggaagguuucagauuuuc

SEQ ID NO: 37273 - RNA, 20 nt, Artificial Sequence
  HTT spacer sequence TTCN PAM
aaugaacauuuccuuugaac

SEQ ID NO: 37274 - RNA, 20 nt, Artificial Sequence
  HTT spacer sequence TTCN PAM
gauuuucggauuuagggagc

SEQ ID NO: 37275 - RNA, 20 nt, Artificial Sequence
  HTT spacer sequence TTCN PAM
gauuuagggagcucaacaaa

SEQ ID NO: 37276 - RNA, 20 nt, Artificial Sequence
  HTT spacer sequence TTCN PAM
aaaccugaaaaaaauccuaa

SEQ ID NO: 37277 - RNA, 20 nt, Artificial Sequence
  HTT spacer sequence TTCN PAM
gguuuugaaauaugugcauu

SEQ ID NO: 37278 - RNA, 20 nt, Artificial Sequence
  HTT spacer sequence TTCN PAM
gaauacuucugaucccaaac

SEQ ID NO: 37279 - RNA, 20 nt, Artificial Sequence
  HTT spacer sequence TTCN PAM
gaauuuaggauuuuuuucag

SEQ ID NO: 37280 - RNA, 20 nt, Artificial Sequence
  HTT spacer sequence TTCN PAM
gaucccaaacauuucagaua

SEQ ID NO: 37281 - RNA, 20 nt, Artificial Sequence
  HTT spacer sequence TTCN PAM
gauaaggguuauucaaccug

SEQ ID NO: 37282 - RNA, 20 nt, Artificial Sequence
  HTT spacer sequence TTCN PAM
accuguacugucagaugauc

SEQ ID NO: 37283 - RNA, 20 nt, Artificial Sequence
  HTT spacer sequence TTCN PAM
uuugggaucaucugacagua

SEQ ID NO: 37284 - RNA, 20 nt, Artificial Sequence
  HTT spacer sequence TTCN PAM
uugauauuugguuaacgauu

SEQ ID NO: 37285 - RNA, 20 nt, Artificial Sequence
  HTT spacer sequence TTCN PAM
gccuaggauuaugaaucaag

SEQ ID NO: 37286 - RNA, 20 nt, Artificial Sequence
  HTT spacer sequence TTCN PAM
uaauccuaggcagaaacugu

SEQ ID NO: 37287 - RNA, 20 nt, Artificial Sequence
  HTT spacer sequence TTCN PAM
ucuugauucauaauccuagg

SEQ ID NO: 37288 - RNA, 20 nt, Artificial Sequence
  HTT spacer sequence TTCN PAM
uauaaaucuuaaauaucuac

SEQ ID NO: 37289 - RNA, 20 nt, Artificial Sequence
  HTT spacer sequence TTCN PAM
uauuuuggauucaacaguuc

SEQ ID NO: 37290 - RNA, 20 nt, Artificial Sequence
  HTT spacer sequence TTCN PAM
acaguucugucaaaacugug

SEQ ID NO: 37291 - RNA, 20 nt, Artificial Sequence
  HTT spacer sequence TTCN PAM
gucaaaacuguggcagugau

SEQ ID NO: 37292 - RNA, 20 nt, Artificial Sequence
  HTT spacer sequence TTCN PAM
uuuuuucccacugaacuauc

SEQ ID NO: 37293 - RNA, 20 nt, Artificial Sequence
  HTT spacer sequence TTCN PAM
cacugaacuaucacaaaauu

SEQ ID NO: 37294 - RNA, 20 nt, Artificial Sequence
  HTT spacer sequence TTCN PAM
gugggaaaaaaagaaucccc

SEQ ID NO: 37295 - RNA, 20 nt, Artificial Sequence
  HTT spacer sequence TTCN PAM
aauuuugugauaguucagug

SEQ ID NO: 37296 - RNA, 20 nt, Artificial Sequence
  HTT spacer sequence TTCN PAM
ccaauuacucuuuuuccaau

SEQ ID NO: 37297 - RNA, 20 nt, Artificial Sequence
  HTT spacer sequence TTCN PAM
ggccggcuaagccagugggg

SEQ ID NO: 37298 - RNA, 20 nt, Artificial Sequence
  HTT spacer sequence TTCN PAM
ccagggggccuaacuucaca

SEQ ID NO: 37299 - RNA, 20 nt, Artificial Sequence
  HTT spacer sequence TTCN PAM
cacagccucugccgcagugc

SEQ ID NO: 37300 - RNA, 20 nt, Artificial Sequence
  HTT spacer sequence TTCN PAM
uaccuccucaauuauuugug

SEQ ID NO: 37301 - RNA, 20 nt, Artificial Sequence
  HTT spacer sequence TTCN PAM
ccuucuuacccuuucuggcc

SEQ ID NO: 37302 - RNA, 20 nt, Artificial Sequence
  HTT spacer sequence TTCN PAM
uacccuuucuggccuuucua

SEQ ID NO: 37303 - RNA, 20 nt, Artificial Sequence
  HTT spacer sequence TTCN PAM
ggccuuucuauggcauuaau

SEQ ID NO: 37304 - RNA, 20 nt, Artificial Sequence
  HTT spacer sequence TTCN PAM
auggcauuaauaccuggucu

SEQ ID NO: 37305 - RNA, 20 nt, Artificial Sequence
  HTT spacer sequence TTCN PAM
uguguacuugaaaaugaauc

SEQ ID NO: 37306 - RNA, 20 nt, Artificial Sequence
  HTT spacer sequence TTCN PAM
aguacacaagaagagaccag

SEQ ID NO: 37307 - RNA, 20 nt, Artificial Sequence
  HTT spacer sequence TTCN PAM
uuuucaaguacacaagaaga

SEQ ID NO: 37308 - RNA, 20 nt, Artificial Sequence
  HTT spacer sequence TTCN PAM
uuagugucagaaccuccaug

SEQ ID NO: 37309 - RNA, 20 nt, Artificial Sequence
  HTT spacer sequence TTCN PAM
gacacuaaggaaaaauauga

SEQ ID NO: 37310 - RNA, 20 nt, Artificial Sequence
  HTT spacer sequence TTCN PAM
agaucugaucagccuuuccc

SEQ ID NO: 37311 - RNA, 20 nt, Artificial Sequence
  HTT spacer sequence TTCN PAM
cacgagccuccaguacagga

SEQ ID NO: 37312 - RNA, 20 nt, Artificial Sequence
  HTT spacer sequence TTCN PAM
ucagugccguucaucggaac

SEQ ID NO: 37313 - RNA, 20 nt, Artificial Sequence
  HTT spacer sequence TTCN PAM
ucggaacucugcugccagcg

SEQ ID NO: 37314 - RNA, 20 nt, Artificial Sequence
  HTT spacer sequence TTCN PAM
gaugaacggcacugaugaag

SEQ ID NO: 37315 - RNA, 20 nt, Artificial Sequence
  HTT spacer sequence TTCN PAM
uccaggcaauucagucucgu

SEQ ID NO: 37316 - RNA, 20 nt, Artificial Sequence
  HTT spacer sequence TTCN PAM
gucucguugugaaaaccuuu

SEQ ID NO: 37317 - RNA, 20 nt, Artificial Sequence
  HTT spacer sequence TTCN PAM
caacgagacugaauugccug

SEQ ID NO: 37318 - RNA, 20 nt, Artificial Sequence
  HTT spacer sequence TTCN PAM
acuguacgucuucauccugc

SEQ ID NO: 37319 - RNA, 20 nt, Artificial Sequence
  HTT spacer sequence TTCN PAM
uccugccgacuauugccagu

SEQ ID NO: 37320 - RNA, 20 nt, Artificial Sequence
  HTT spacer sequence TTCN PAM
cugccuuaaaaauggaguau

SEQ ID NO: 37321 - RNA, 20 nt, Artificial Sequence
  HTT spacer sequence TTCN PAM
auacuccauuuuuaaggcag

SEQ ID NO: 37322 - RNA, 20 nt, Artificial Sequence
  HTT spacer sequence TTCN PAM
gauuugcaaaauagucaucu

SEQ ID NO: 37323 - RNA, 20 nt, Artificial Sequence
  HTT spacer sequence TTCN PAM
uuuccuucuugcuguuagcc

SEQ ID NO: 37324 - RNA, 20 nt, Artificial Sequence
  HTT spacer sequence TTCN PAM
uucuugcuguuagccaacca

SEQ ID NO: 37325 - RNA, 20 nt, Artificial Sequence
  HTT spacer sequence TTCN PAM
ugcuguuagccaaccaugcu

SEQ ID NO: 37326 - RNA, 20 nt, Artificial Sequence
  HTT spacer sequence TTCN PAM
gcaugguuggcuaacagcaa

SEQ ID NO: 37327 - RNA, 20 nt, Artificial Sequence
  HTT spacer sequence TTCN PAM
ucagcaugguuggcuaacag

SEQ ID NO: 37328 - RNA, 20 nt, Artificial Sequence
  HTT spacer sequence TTCN PAM
gugcuuggaggggauccauc

SEQ ID NO: 37329 - RNA, 20 nt, Artificial Sequence
  HTT spacer sequence TTCN PAM
gugcaccccuuuccgugugc

SEQ ID NO: 37330 - RNA, 20 nt, Artificial Sequence
  HTT spacer sequence TTCN PAM
gugugcuggcucgcaugguc

SEQ ID NO: 37331 - RNA, 20 nt, Artificial Sequence
  HTT spacer sequence TTCN PAM
acccggcgacaagcaaggau

SEQ ID NO: 37332 - RNA, 20 nt, Artificial Sequence
  HTT spacer sequence TTCN PAM
ggcugcaaauuuacagguau

SEQ ID NO: 37333 - RNA, 20 nt, Artificial Sequence
  HTT spacer sequence TTCN PAM
caauaccuguaaauuugcag

SEQ ID NO: 37334 - RNA, 20 nt, Artificial Sequence
  HTT spacer sequence TTCN PAM
cuucccaauaccuguaaauu

SEQ ID NO: 37335 - RNA, 20 nt, Artificial Sequence
  HTT spacer sequence TTCN PAM
auauaaaucaauaucagggu

SEQ ID NO: 37336 - RNA, 20 nt, Artificial Sequence
  HTT spacer sequence TTCN PAM
uccguaaguauggucuugac

SEQ ID NO: 37337 - RNA, 20 nt, Artificial Sequence
  HTT spacer sequence TTCN PAM
aucggugaccaugucaagac

SEQ ID NO: 37338 - RNA, 20 nt, Artificial Sequence
  HTT spacer sequence TTCN PAM
auguuucuaucggugaccau

SEQ ID NO: 37339 - RNA, 20 nt, Artificial Sequence
  HTT spacer sequence TTCN PAM
uguauuuuuuucuagucugc

SEQ ID NO: 37340 - RNA, 20 nt, Artificial Sequence
  HTT spacer sequence TTCN PAM
agucugcccuuacuaggaug

SEQ ID NO: 37341 - RNA, 20 nt, Artificial Sequence
  HTT spacer sequence TTCN PAM
uccuaguaagggcagacuag

SEQ ID NO: 37342 - RNA, 20 nt, Artificial Sequence
  HTT spacer sequence TTCN PAM
uccuuuuuaaaugagcauga

SEQ ID NO: 37343 - RNA, 20 nt, Artificial Sequence
  HTT spacer sequence TTCN PAM
auuggcaacugggccaugcu

SEQ ID NO: 37344 - RNA, 20 nt, Artificial Sequence
  HTT spacer sequence TTCN PAM
uccauuggcaacugggccau

SEQ ID NO: 37345 - RNA, 20 nt, Artificial Sequence
  HTT spacer sequence TTCN PAM
guugaguucuuccauuggca

SEQ ID NO: 37346 - RNA, 20 nt, Artificial Sequence
  HTT spacer sequence TTCN PAM
uggauucuguugaguucuuc

SEQ ID NO: 37347 - RNA, 20 nt, Artificial Sequence
  HTT spacer sequence TTCN PAM
gagcagcgggcucgcucaga

SEQ ID NO: 37348 - RNA, 20 nt, Artificial Sequence
  HTT spacer sequence TTCN PAM
agcauuaccucugagcgagc

SEQ ID NO: 37349 - RNA, 20 nt, Artificial Sequence
  HTT spacer sequence TTCN PAM
cguacaaaucuauauccuuu

SEQ ID NO: 37350 - RNA, 20 nt, Artificial Sequence
  HTT spacer sequence TTCN PAM
caggacaagaaaucgaugug

SEQ ID NO: 37351 - RNA, 20 nt, Artificial Sequence
  HTT spacer sequence TTCN PAM
uguccugugaauuuauuccc

SEQ ID NO: 37352 - RNA, 20 nt, Artificial Sequence
  HTT spacer sequence TTCN PAM
gcaguaaacccaccuauaag

SEQ ID NO: 37353 - RNA, 20 nt, Artificial Sequence
  HTT spacer sequence TTCN PAM
auuauggcacuucugcagua

SEQ ID NO: 37354 - RNA, 20 nt, Artificial Sequence
  HTT spacer sequence TTCN PAM
uacuuuuaaaacaaccagau

SEQ ID NO: 37355 - RNA, 20 nt, Artificial Sequence
  HTT spacer sequence TTCN PAM
aaagaguaaaggaugaccgg

SEQ ID NO: 37356 - RNA, 20 nt, Artificial Sequence
  HTT spacer sequence TTCN PAM
aaaugcuaccucucaaacag

SEQ ID NO: 37357 - RNA, 20 nt, Artificial Sequence
  HTT spacer sequence TTCN PAM
cuguccugugaugaguggga

SEQ ID NO: 37358 - RNA, 20 nt, Artificial Sequence
  HTT spacer sequence TTCN PAM
cacucaucacaggacaguga

SEQ ID NO: 37359 - RNA, 20 nt, Artificial Sequence
  HTT spacer sequence TTCN PAM
aagcauuuaaucauuuaguu

SEQ ID NO: 37360 - RNA, 20 nt, Artificial Sequence
  HTT spacer sequence TTCN PAM
caaagacuuugcaaacacaa

SEQ ID NO: 37361 - RNA, 20 nt, Artificial Sequence
  HTT spacer sequence TTCN PAM
gacaaaggcuucucaaagac

SEQ ID NO: 37362 - RNA, 20 nt, Artificial Sequence
  HTT spacer sequence TTCN PAM
augacugcagaauaaguuaa

SEQ ID NO: 37363 - RNA, 20 nt, Artificial Sequence
  HTT spacer sequence TTCN PAM
gcagucauggaaauacacuc

SEQ ID NO: 37364 - RNA, 20 nt, Artificial Sequence
  HTT spacer sequence TTCN PAM
uucccuugcggggcggggug

SEQ ID NO: 37365 - RNA, 20 nt, Artificial Sequence
  HTT spacer sequence TTCN PAM
cuugcggggcgggguggggg

SEQ ID NO: 37366 - RNA, 20 nt, Artificial Sequence
  HTT spacer sequence TTCN PAM
cugcugucucucucucccuc

SEQ ID NO: 37367 - RNA, 20 nt, Artificial Sequence
  HTT spacer sequence TTCN PAM
ccuucucugcugucucucuc

SEQ ID NO: 37368 - RNA, 20 nt, Artificial Sequence
  HTT spacer sequence TTCN PAM
gcucaaaguacacagcauga

SEQ ID NO: 37369 - RNA, 20 nt, Artificial Sequence
  HTT spacer sequence TTCN PAM
uuuuuugcaguuucagcuca

SEQ ID NO: 37370 - RNA, 20 nt, Artificial Sequence
  HTT spacer sequence TTCN PAM
gucuuuagaguaccuugucu

SEQ ID NO: 37371 - RNA, 20 nt, Artificial Sequence
  HTT spacer sequence TTCN PAM
gucuuuagaguaccuuguug

SEQ ID NO: 37372 - RNA, 20 nt, Artificial Sequence
  HTT spacer sequence TTCN PAM
gucuguagggccaagcucuu

SEQ ID NO: 37373 - RNA, 20 nt, Artificial Sequence
  HTT spacer sequence TTCN PAM
uaaugcaaauuacaaaagag

SEQ ID NO: 37374 - RNA, 20 nt, Artificial Sequence
  HTT spacer sequence TTCN PAM
guccagaugagggagauuaa

SEQ ID NO: 37375 - RNA, 20 nt, Artificial Sequence
  HTT spacer sequence TTCN PAM
aaauaaaaucaccucaucug

SEQ ID NO: 37376 - RNA, 20 nt, Artificial Sequence
  HTT spacer sequence TTCN PAM
uggucauuucaaaauaaaau

SEQ ID NO: 37377 - RNA, 20 nt, Artificial Sequence
  HTT spacer sequence TTCN PAM
uaucaguugucuuacuggga

SEQ ID NO: 37378 - RNA, 20 nt, Artificial Sequence
  HTT spacer sequence TTCN PAM
acuaucaaauaucccaguaa

SEQ ID NO: 37379 - RNA, 20 nt, Artificial Sequence
  HTT spacer sequence TTCN PAM
uaauaaauguaaaacagauc

SEQ ID NO: 37380 - RNA, 20 nt, Artificial Sequence
  HTT spacer sequence TTCN PAM
uuuauacucaaacacugcaa

SEQ ID NO: 37381 - RNA, 20 nt, Artificial Sequence
  HTT spacer sequence TTCN PAM
ggaaaauauuaauggaguac

SEQ ID NO: 37382 - RNA, 20 nt, Artificial Sequence
  HTT spacer sequence TTCN PAM
agaaauuucauuuauacuca

SEQ ID NO: 37383 - RNA, 20 nt, Artificial Sequence
  HTT spacer sequence TTCN PAM
caucaauacucaaacagguc

SEQ ID NO: 37384 - RNA, 20 nt, Artificial Sequence
  HTT spacer sequence TTCN PAM
cagcuaucuucucaucaaua

SEQ ID NO: 37385 - RNA, 20 nt, Artificial Sequence
  HTT spacer sequence TTCN PAM
ucacagcuaucuucucauca

SEQ ID NO: 37386 - RNA, 20 nt, Artificial Sequence
  HTT spacer sequence TTCN PAM
uuuaagaagccacuaauagu

SEQ ID NO: 37387 - RNA, 20 nt, Artificial Sequence
  HTT spacer sequence TTCN PAM
uaaaggaaaauacacuuguu

SEQ ID NO: 37388 - RNA, 20 nt, Artificial Sequence
  HTT spacer sequence TTCN PAM
agaauccuagugugcagagu

SEQ ID NO: 37389 - RNA, 20 nt, Artificial Sequence
  HTT spacer sequence TTCN PAM
agaaauauacacucuaagga

SEQ ID NO: 37390 - RNA, 20 nt, Artificial Sequence
  HTT spacer sequence TTCN PAM
uuuuuauuuguauuuuagac

SEQ ID NO: 37391 - RNA, 20 nt, Artificial Sequence
  HTT spacer sequence TTCN PAM
cugcuggacagguuucgucu

SEQ ID NO: 37392 - RNA, 20 nt, Artificial Sequence
  HTT spacer sequence TTCN PAM
ucucuccaccaugcaagacu

SEQ ID NO: 37393 - RNA, 20 nt, Artificial Sequence
  HTT spacer sequence TTCN PAM
cacccgcuggacggggaugg

SEQ ID NO: 37394 - RNA, 20 nt, Artificial Sequence
  HTT spacer sequence TTCN PAM
agugacacgugcccaucccc

SEQ ID NO: 37395 - RNA, 20 nt, Artificial Sequence
  HTT spacer sequence TTCN PAM
ggcgcucggcucggcucagu

SEQ ID NO: 37396 - RNA, 20 nt, Artificial Sequence
  HTT spacer sequence TTCN PAM
cugagccgagccgagcgcca

SEQ ID NO: 37397 - RNA, 20 nt, Artificial Sequence
  HTT spacer sequence TTCN PAM
cccacuaacuacucacccca

SEQ ID NO: 37398 - RNA, 20 nt, Artificial Sequence
  HTT spacer sequence TTCN PAM
uugauucacccacuaacuac

SEQ ID NO: 37399 - RNA, 20 nt, Artificial Sequence
  HTT spacer sequence TTCN PAM
agcacaugucaaugccguua

SEQ ID NO: 37400 - RNA, 20 nt, Artificial Sequence
  HTT spacer sequence TTCN PAM
ggccaccugugaguugcacu

SEQ ID NO: 37401 - RNA, 20 nt, Artificial Sequence
  HTT spacer sequence TTCN PAM
gguauguugucagcaccucc

SEQ ID NO: 37402 - RNA, 20 nt, Artificial Sequence
  HTT spacer sequence TTCN PAM
uggacaaaguucagcuuaug

SEQ ID NO: 37403 - RNA, 20 nt, Artificial Sequence
  HTT spacer sequence TTCN PAM
gcuuaugaauaugaauuuag

SEQ ID NO: 37404 - RNA, 20 nt, Artificial Sequence
  HTT spacer sequence TTCN PAM
uaagcugaacuuuguccagg

SEQ ID NO: 37405 - RNA, 20 nt, Artificial Sequence
  HTT spacer sequence TTCN PAM
uauucauaagcugaacuuug

SEQ ID NO: 37406 - RNA, 20 nt, Artificial Sequence
  HTT spacer sequence TTCN PAM
aaaaccagcagcccaaguau

SEQ ID NO: 37407 - RNA, 20 nt, Artificial Sequence
  HTT spacer sequence TTCN PAM
uauacuugggcugcugguuu

SEQ ID NO: 37408 - RNA, 20 nt, Artificial Sequence
  HTT spacer sequence TTCN PAM
cuuucuuauacuugggcugc

SEQ ID NO: 37409 - RNA, 20 nt, Artificial Sequence
  HTT spacer sequence TTCN PAM
guccugccuucuuaggcucu

SEQ ID NO: 37410 - RNA, 20 nt, Artificial Sequence
  HTT spacer sequence TTCN PAM
uaggcucuauucgcuaagca

SEQ ID NO: 37411 - RNA, 20 nt, Artificial Sequence
  HTT spacer sequence TTCN PAM
cuaagcaccugcccugcccu

SEQ ID NO: 37412 - RNA, 20 nt, Artificial Sequence
  HTT spacer sequence TTCN PAM
aaauauagcuaaaccacuaa

SEQ ID NO: 37413 - RNA, 20 nt, Artificial Sequence
  HTT spacer sequence TTCN PAM
aauaggccuuccaaauauag

SEQ ID NO: 37414 - RNA, 20 nt, Artificial Sequence
  HTT spacer sequence TTCN PAM
ccaggugaagggggaggcug

SEQ ID NO: 37415 - RNA, 20 nt, Artificial Sequence
  HTT spacer sequence TTCN PAM
ccuggugaacuuccaauagg

SEQ ID NO: 37416 - RNA, 20 nt, Artificial Sequence
  HTT spacer sequence TTCN PAM
guuaccugccugggcacccu

SEQ ID NO: 37417 - RNA, 20 nt, Artificial Sequence
  HTT spacer sequence TTCN PAM
ccuuuggacuucuguuaccu

SEQ ID NO: 37418 - RNA, 20 nt, Artificial Sequence
  HTT spacer sequence TTCN PAM
caagcacuggccuaggccug

SEQ ID NO: 37419 - RNA, 20 nt, Artificial Sequence
  HTT spacer sequence TTCN PAM
caucccuggagcuacaggcc

SEQ ID NO: 37420 - RNA, 20 nt, Artificial Sequence
  HTT spacer sequence TTCN PAM
aggggacuucacaucccugg

SEQ ID NO: 37421 - RNA, 20 nt, Artificial Sequence
  HTT spacer sequence TTCN PAM
ccuuauccauuuuuuucuuc

SEQ ID NO: 37422 - RNA, 20 nt, Artificial Sequence
  HTT spacer sequence TTCN PAM
ucccaggacugguacguuca

SEQ ID NO: 37423 - RNA, 20 nt, Artificial Sequence
  HTT spacer sequence TTCN PAM
caggacugguacguucaucu

SEQ ID NO: 37424 - RNA, 20 nt, Artificial Sequence
  HTT spacer sequence TTCN PAM
ucuugucaaaucccaguguu

SEQ ID NO: 37425 - RNA, 20 nt, Artificial Sequence
  HTT spacer sequence TTCN PAM
gcacugcuggaaggugcaga

SEQ ID NO: 37426 - RNA, 20 nt, Artificial Sequence
  HTT spacer sequence TTCN PAM
agcagugcagaaucugaccu

SEQ ID NO: 37427 - RNA, 20 nt, Artificial Sequence
  HTT spacer sequence TTCN PAM
ccagcucugcaccuuccagc

SEQ ID NO: 37428 - RNA, 20 nt, Artificial Sequence
  HTT spacer sequence TTCN PAM
ugcugaagauaugaaugccu

SEQ ID NO: 37429 - RNA, 20 nt, Artificial Sequence
  HTT spacer sequence TTCN PAM
gcaggaauccgauucaccag

SEQ ID NO: 37430 - RNA, 20 nt, Artificial Sequence
  HTT spacer sequence TTCN PAM
uaucuucagcaggaauccga

SEQ ID NO: 37431 - RNA, 20 nt, Artificial Sequence
  HTT spacer sequence TTCN PAM
ugaugaacucgguacggggg

SEQ ID NO: 37432 - RNA, 20 nt, Artificial Sequence
  HTT spacer sequence TTCN PAM
ucaugaaggcauucauaucu

SEQ ID NO: 37433 - RNA, 20 nt, Artificial Sequence
  HTT spacer sequence TTCN PAM
uugccuccacugcucccccc

SEQ ID NO: 37434 - RNA, 20 nt, Artificial Sequence
  HTT spacer sequence TTCN PAM
ugugacuuccaagugggauu

SEQ ID NO: 37435 - RNA, 20 nt, Artificial Sequence
  HTT spacer sequence TTCN PAM
aagugggauuugucucauca

SEQ ID NO: 37436 - RNA, 20 nt, Artificial Sequence
  HTT spacer sequence TTCN PAM
gaguggagucucuccgacau

SEQ ID NO: 37437 - RNA, 20 nt, Artificial Sequence
  HTT spacer sequence TTCN PAM
cggccccauucagaguggag

SEQ ID NO: 37438 - RNA, 20 nt, Artificial Sequence
  HTT spacer sequence TTCN PAM
gauggggucgggacaugggg

SEQ ID NO: 37439 - RNA, 20 nt, Artificial Sequence
  HTT spacer sequence TTCN PAM
gucucgaucagcauaacccc

SEQ ID NO: 37440 - RNA, 20 nt, Artificial Sequence
  HTT spacer sequence TTCN PAM
gccacauuagaauccacgga

SEQ ID NO: 37441 - RNA, 20 nt, Artificial Sequence
  HTT spacer sequence TTCN PAM
aauguggcugaaacaaugug

SEQ ID NO: 37442 - RNA, 20 nt, Artificial Sequence
  HTT spacer sequence TTCN PAM
aaacaacaccuccguggauu

SEQ ID NO: 37443 - RNA, 20 nt, Artificial Sequence
  HTT spacer sequence TTCN PAM
caucccaaaccauacaccca

SEQ ID NO: 37444 - RNA, 20 nt, Artificial Sequence
  HTT spacer sequence TTCN PAM
uccaguggaggccagauagu

SEQ ID NO: 37445 - RNA, 20 nt, Artificial Sequence
  HTT spacer sequence TTCN PAM
gucuuggccauggagcuuag

SEQ ID NO: 37446 - RNA, 20 nt, Artificial Sequence
  HTT spacer sequence TTCN PAM
auucugucuuggccauggag

SEQ ID NO: 37447 - RNA, 20 nt, Artificial Sequence
  HTT spacer sequence TTCN PAM
acacagugucguaaugcgug

SEQ ID NO: 37448 - RNA, 20 nt, Artificial Sequence
  HTT spacer sequence TTCN PAM
agugucuuggaaguugaucu

SEQ ID NO: 37449 - RNA, 20 nt, Artificial Sequence
  HTT spacer sequence TTCN PAM
aagacacuagaaacaaguua

SEQ ID NO: 37450 - RNA, 20 nt, Artificial Sequence
  HTT spacer sequence TTCN PAM
ucuacucacaccucuguuag

SEQ ID NO: 37451 - RNA, 20 nt, Artificial Sequence
  HTT spacer sequence TTCN PAM
ucaccccccaaccccagaug

SEQ ID NO: 37452 - RNA, 20 nt, Artificial Sequence
  HTT spacer sequence TTCN PAM
ccccccaaccccagauguca

SEQ ID NO: 37453 - RNA, 20 nt, Artificial Sequence
  HTT spacer sequence TTCN PAM
ucucagaccuacuaggacgg

SEQ ID NO: 37454 - RNA, 20 nt, Artificial Sequence
  HTT spacer sequence TTCN PAM
cagaccuacuaggacgggag

SEQ ID NO: 37455 - RNA, 20 nt, Artificial Sequence
  HTT spacer sequence TTCN PAM
cccguccuaguaggucugag

SEQ ID NO: 37456 - RNA, 20 nt, Artificial Sequence
  HTT spacer sequence TTCN PAM
cucccauuugcugcauauca

SEQ ID NO: 37457 - RNA, 20 nt, Artificial Sequence
  HTT spacer sequence TTCN PAM
ugaaaagagaccuugugggg

SEQ ID NO: 37458 - RNA, 20 nt, Artificial Sequence
  HTT spacer sequence TTCN PAM
ugaacaccugccgucacucc

SEQ ID NO: 37459 - RNA, 20 nt, Artificial Sequence
  HTT spacer sequence TTCN PAM
gauguacugaagagcucaac

SEQ ID NO: 37460 - RNA, 20 nt, Artificial Sequence
  HTT spacer sequence TTCN PAM
guacaucagaacacacuguu

SEQ ID NO: 37461 - RNA, 20 nt, Artificial Sequence
  HTT spacer sequence TTCN PAM
guugagcucuucaguacauc

SEQ ID NO: 37462 - RNA, 20 nt, Artificial Sequence
  HTT spacer sequence TTCN PAM
ccuguuguuuucaguugagc

SEQ ID NO: 37463 - RNA, 20 nt, Artificial Sequence
  HTT spacer sequence TTCN PAM
uacgauucuccugccucagc

SEQ ID NO: 37464 - RNA, 20 nt, Artificial Sequence
  HTT spacer sequence TTCN PAM
ccugccucagccucccaaau

SEQ ID NO: 37465 - RNA, 20 nt, Artificial Sequence
  HTT spacer sequence TTCN PAM
ccauguuggccaggcugguc

SEQ ID NO: 37466 - RNA, 20 nt, Artificial Sequence
  HTT spacer sequence TTCN PAM
ugcagugaaagcuaacuuac

SEQ ID NO: 37467 - RNA, 20 nt, Artificial Sequence
  HTT spacer sequence TTCN PAM
cugcaugaaucuuaagauaa

SEQ ID NO: 37468 - RNA, 20 nt, Artificial Sequence
  HTT spacer sequence TTCN PAM
aaauuugcuaauugggcuuu

SEQ ID NO: 37469 - RNA, 20 nt, Artificial Sequence
  HTT spacer sequence TTCN PAM
aagcccaauuagcaaauuug

SEQ ID NO: 37470 - RNA, 20 nt, Artificial Sequence
  HTT spacer sequence TTCN PAM
gacuguaaaagaaagcuuca

SEQ ID NO: 37471 - RNA, 20 nt, Artificial Sequence
  HTT spacer sequence TTCN PAM
uuuacagucagaacuuuuac

SEQ ID NO: 37472 - RNA, 20 nt, Artificial Sequence
  HTT spacer sequence TTCN PAM
acuuuuggcauucaugaugc

SEQ ID NO: 37473 - RNA, 20 nt, Artificial Sequence
  HTT spacer sequence TTCN PAM
ugaugcuuuucugaguauua

SEQ ID NO: 37474 - RNA, 20 nt, Artificial Sequence
  HTT spacer sequence TTCN PAM
gaguauuaaacuaagauaga

SEQ ID NO: 37475 - RNA, 20 nt, Artificial Sequence
  HTT spacer sequence TTCN PAM
gguaaaacaucuaucuuagu

SEQ ID NO: 37476 - RNA, 20 nt, Artificial Sequence
  HTT spacer sequence TTCN PAM
uaugucaauuuggauuaugu

SEQ ID NO: 37477 - RNA, 20 nt, Artificial Sequence
  HTT spacer sequence TTCN PAM
aaccaaaauuuuggcauuca

SEQ ID NO: 37478 - RNA, 20 nt, Artificial Sequence
  HTT spacer sequence TTCN PAM
uauggcuacuuuuacguauu

SEQ ID NO: 37479 - RNA, 20 nt, Artificial Sequence
  HTT spacer sequence TTCN PAM
gcugcauuugaacaucuuuu

SEQ ID NO: 37480 - RNA, 20 nt, Artificial Sequence
  HTT spacer sequence TTCN PAM
aaugcagcugaaauacguaa

SEQ ID NO: 37481 - RNA, 20 nt, Artificial Sequence
  HTT spacer sequence TTCN PAM
aacuuuagggugguuggugu

SEQ ID NO: 37482 - RNA, 20 nt, Artificial Sequence
  HTT spacer sequence TTCN PAM
uaaaaacaaaaucaaagcua

SEQ ID NO: 37483 - RNA, 20 nt, Artificial Sequence
  HTT spacer sequence TTCN PAM
agcaaauccaagagcauaaa

SEQ ID NO: 37484 - RNA, 20 nt, Artificial Sequence
  HTT spacer sequence TTCN PAM
cucuuaguauuuuaaguaau

SEQ ID NO: 37485 - RNA, 20 nt, Artificial Sequence
  HTT spacer sequence TTCN PAM
acauaugcuuaguaaaauau

SEQ ID NO: 37486 - RNA, 20 nt, Artificial Sequence
  HTT spacer sequence TTCN PAM
uucaacauaugcuuaguaaa

SEQ ID NO: 37487 - RNA, 20 nt, Artificial Sequence
  HTT spacer sequence TTCN PAM
aauauuuauaacaggcauag

SEQ ID NO: 37488 - RNA, 20 nt, Artificial Sequence
  HTT spacer sequence TTCN PAM
acucuaugccuguuauaaau

SEQ ID NO: 37489 - RNA, 20 nt, Artificial Sequence
  HTT spacer sequence TTCN PAM
uaaaaauauuuuugauggua

SEQ ID NO: 37490 - RNA, 20 nt, Artificial Sequence
  HTT spacer sequence TTCN PAM
cagaaacauuugccuuauuc

SEQ ID NO: 37491 - RNA, 20 nt, Artificial Sequence
  HTT spacer sequence TTCN PAM
gagaaaauacaaauugguau

SEQ ID NO: 37492 - RNA, 20 nt, Artificial Sequence
  HTT spacer sequence TTCN PAM
uuuuucuguuguguuuuucu

SEQ ID NO: 37493 - RNA, 20 nt, Artificial Sequence
  HTT spacer sequence TTCN PAM
guuguguuuuucuuaccuga

SEQ ID NO: 37494 - RNA, 20 nt, Artificial Sequence
  HTT spacer sequence TTCN PAM
uaccugauugaaagcucaua

SEQ ID NO: 37495 - RNA, 20 nt, Artificial Sequence
  HTT spacer sequence TTCN PAM
aucagguaagaaaaacacaa

SEQ ID NO: 37496 - RNA, 20 nt, Artificial Sequence
  HTT spacer sequence TTCN PAM
ggaguucaaccuaagccugc

SEQ ID NO: 37497 - RNA, 20 nt, Artificial Sequence
  HTT spacer sequence TTCN PAM
accuaagccugcuagcucca

SEQ ID NO: 37498 - RNA, 20 nt, Artificial Sequence
  HTT spacer sequence TTCN PAM
cucaucccuaggcuuaagca

SEQ ID NO: 37499 - RNA, 20 nt, Artificial Sequence
  HTT spacer sequence TTCN PAM
gguggccagaagagugcccu

SEQ ID NO: 37500 - RNA, 20 nt, Artificial Sequence
  HTT spacer sequence TTCN PAM
ggccaccagaaauuucacuc

SEQ ID NO: 37501 - RNA, 20 nt, Artificial Sequence
  HTT spacer sequence TTCN PAM
aaaagggcacucuucuggcc

SEQ ID NO: 37502 - RNA, 20 nt, Artificial Sequence
  HTT spacer sequence TTCN PAM
agcccgagcugccugcagag

SEQ ID NO: 37503 - RNA, 20 nt, Artificial Sequence
  HTT spacer sequence TTCN PAM
acuugcuccaguaggccgcc

SEQ ID NO: 37504 - RNA, 20 nt, Artificial Sequence
  HTT spacer sequence TTCN PAM
agggccaguauaguacuuug

SEQ ID NO: 37505 - RNA, 20 nt, Artificial Sequence
  HTT spacer sequence TTCN PAM
auguauuagauccacugccu

SEQ ID NO: 37506 - RNA, 20 nt, Artificial Sequence
  HTT spacer sequence TTCN PAM
gagccgaggacacccgugcu

SEQ ID NO: 37507 - RNA, 20 nt, Artificial Sequence
  HTT spacer sequence TTCN PAM
uccuguguguuugccacuuu

SEQ ID NO: 37508 - RNA, 20 nt, Artificial Sequence
  HTT spacer sequence TTCN PAM
uguguguuugccacuuugcc

SEQ ID NO: 37509 - RNA, 20 nt, Artificial Sequence
  HTT spacer sequence TTCN PAM
uugacauggucauggacaua

SEQ ID NO: 37510 - RNA, 20 nt, Artificial Sequence
  HTT spacer sequence TTCN PAM
ucaagggcuuagagcccuau

SEQ ID NO: 37511 - RNA, 20 nt, Artificial Sequence
  HTT spacer sequence TTCN PAM
ucaguggcacaucuacacau

SEQ ID NO: 37512 - RNA, 20 nt, Artificial Sequence
  HTT spacer sequence TTCN PAM
ucagauucucagagaauugc

SEQ ID NO: 37513 - RNA, 20 nt, Artificial Sequence
  HTT spacer sequence TTCN PAM
cagagaauugcuugacugcc

SEQ ID NO: 37514 - RNA, 20 nt, Artificial Sequence
  HTT spacer sequence TTCN PAM
cugagaaucugaugaaagcu

SEQ ID NO: 37515 - RNA, 20 nt, Artificial Sequence
  HTT spacer sequence TTCN PAM
aaguugaugcaucugugcuc

SEQ ID NO: 37516 - RNA, 20 nt, Artificial Sequence
  HTT spacer sequence TTCN PAM
aaaggcagucaagcaauucu

SEQ ID NO: 37517 - RNA, 20 nt, Artificial Sequence
  HTT spacer sequence TTCN PAM
guuucaggggaugcugcacu

SEQ ID NO: 37518 - RNA, 20 nt, Artificial Sequence
  HTT spacer sequence TTCN PAM
ggggaugcugcacuguauca

SEQ ID NO: 37519 - RNA, 20 nt, Artificial Sequence
  HTT spacer sequence TTCN PAM
uccugagaaagagaaggaca

SEQ ID NO: 37520 - RNA, 20 nt, Artificial Sequence
  HTT spacer sequence TTCN PAM
caggaggaaggugcaaauga

SEQ ID NO: 37521 - RNA, 20 nt, Artificial Sequence
  HTT spacer sequence TTCN PAM
cuuucucaggaggaaggugc

SEQ ID NO: 37522 - RNA, 20 nt, Artificial Sequence
  HTT spacer sequence TTCN PAM
caauguccuucucuuucuca

SEQ ID NO: 37523 - RNA, 20 nt, Artificial Sequence
  HTT spacer sequence TTCN PAM
ugguggcaacccuugaggua

SEQ ID NO: 37524 - RNA, 20 nt, Artificial Sequence
  HTT spacer sequence TTCN PAM
gugucagccccaugcccccu

SEQ ID NO: 37525 - RNA, 20 nt, Artificial Sequence
  HTT spacer sequence TTCN PAM
aauaaaacugcuuuacccuc

SEQ ID NO: 37526 - RNA, 20 nt, Artificial Sequence
  HTT spacer sequence TTCN PAM
aucucagccuggcaguaagu

SEQ ID NO: 37527 - RNA, 20 nt, Artificial Sequence
  HTT spacer sequence TTCN PAM
cccucaccucgccacuccuc

SEQ ID NO: 37528 - RNA, 20 nt, Artificial Sequence
  HTT spacer sequence TTCN PAM
caucugcaccuaccauguua

SEQ ID NO: 37529 - RNA, 20 nt, Artificial Sequence
  HTT spacer sequence TTCN PAM
ugucucuaaaauuaggaucc

SEQ ID NO: 37530 - RNA, 20 nt, Artificial Sequence
  HTT spacer sequence TTCN PAM
agaugauuauuuuucauguc

SEQ ID NO: 37531 - RNA, 20 nt, Artificial Sequence
  HTT spacer sequence TTCN PAM
uuggcugacauguccaggcc

SEQ ID NO: 37532 - RNA, 20 nt, Artificial Sequence
  HTT spacer sequence TTCN PAM
cccccagaauguguacacgu

SEQ ID NO: 37533 - RNA, 20 nt, Artificial Sequence
  HTT spacer sequence TTCN PAM
gggggcgaauuacaagcacu

SEQ ID NO: 37534 - RNA, 20 nt, Artificial Sequence
  HTT spacer sequence TTCN PAM
ggaugcauuaaagucuggcc

SEQ ID NO: 37535 - RNA, 20 nt, Artificial Sequence
  HTT spacer sequence TTCN PAM
uuggugugagguggaggcgg

SEQ ID NO: 37536 - RNA, 20 nt, Artificial Sequence
  HTT spacer sequence TTCN PAM
gaaccacguggagucauaug

SEQ ID NO: 37537 - RNA, 20 nt, Artificial Sequence
  HTT spacer sequence TTCN PAM
gaauaaggguguauuuauca

SEQ ID NO: 37538 - RNA, 20 nt, Artificial Sequence
  HTT spacer sequence TTCN PAM
gguuucagcuuaguggggaa

SEQ ID NO: 37539 - RNA, 20 nt, Artificial Sequence
  HTT spacer sequence TTCN PAM
gcuuaguggggaagugggaa

SEQ ID NO: 37540 - RNA, 20 nt, Artificial Sequence
  HTT spacer sequence TTCN PAM
ccacuaagcugaaaccugaa

SEQ ID NO: 37541 - RNA, 20 nt, Artificial Sequence
  HTT spacer sequence TTCN PAM
cacuuccccacuaagcugaa

SEQ ID NO: 37542 - RNA, 20 nt, Artificial Sequence
  HTT spacer sequence TTCN PAM
uccugcauacagcaggcaca

SEQ ID NO: 37543 - RNA, 20 nt, Artificial Sequence
  HTT spacer sequence TTCN PAM
ucaccugucaaaugggagua

SEQ ID NO: 37544 - RNA, 20 nt, Artificial Sequence
  HTT spacer sequence TTCN PAM
cuaagccuugcuuuccucac

SEQ ID NO: 37545 - RNA, 20 nt, Artificial Sequence
  HTT spacer sequence TTCN PAM
gugacuugcccagguccucu

SEQ ID NO: 37546 - RNA, 20 nt, Artificial Sequence
  HTT spacer sequence TTCN PAM
uagcucagaggaccugggca

SEQ ID NO: 37547 - RNA, 20 nt, Artificial Sequence
  HTT spacer sequence TTCN PAM
ggcauuugaacccaaggccu

SEQ ID NO: 37548 - RNA, 20 nt, Artificial Sequence
  HTT spacer sequence TTCN PAM
aaugccagaauggcuacuuc

SEQ ID NO: 37549 - RNA, 20 nt, Artificial Sequence
  HTT spacer sequence TTCN PAM
agggauagcaggccuugggu

SEQ ID NO: 37550 - RNA, 20 nt, Artificial Sequence
  HTT spacer sequence TTCN PAM
accuaugacagaggcaagcc

SEQ ID NO: 37551 - RNA, 20 nt, Artificial Sequence
  HTT spacer sequence TTCN PAM
uuggggcucccacagcacca

SEQ ID NO: 37552 - RNA, 20 nt, Artificial Sequence
  HTT spacer sequence TTCN PAM
acaggagcccacagcgcuga

SEQ ID NO: 37553 - RNA, 20 nt, Artificial Sequence
  HTT spacer sequence TTCN PAM
gcgcugugggcuccuguaga

SEQ ID NO: 37554 - RNA, 20 nt, Artificial Sequence
  HTT spacer sequence TTCN PAM
ccaaagugccaguccccucu

SEQ ID NO: 37555 - RNA, 20 nt, Artificial Sequence
  HTT spacer sequence TTCN PAM
guccugacccaccuauuccc

SEQ ID NO: 37556 - RNA, 20 nt, Artificial Sequence
  HTT spacer sequence TTCN PAM
ggaagggcaagggcaccugg

SEQ ID NO: 37557 - RNA, 20 nt, Artificial Sequence
  HTT spacer sequence TTCN PAM
agaaggacagcucugacaug

SEQ ID NO: 37558 - RNA, 20 nt, Artificial Sequence
  HTT spacer sequence TTCN PAM
acaacugugauucacacggc

SEQ ID NO: 37559 - RNA, 20 nt, Artificial Sequence
  HTT spacer sequence TTCN PAM
cacggcuuccccaaacgaag

SEQ ID NO: 37560 - RNA, 20 nt, Artificial Sequence
  HTT spacer sequence TTCN PAM
ccaaacgaagguacacgagu

SEQ ID NO: 37561 - RNA, 20 nt, Artificial Sequence
  HTT spacer sequence TTCN PAM
uuuggggaagccgugugaau

SEQ ID NO: 37562 - RNA, 20 nt, Artificial Sequence
  HTT spacer sequence TTCN PAM
gugacucgguacuucccuuu

SEQ ID NO: 37563 - RNA, 20 nt, Artificial Sequence
  HTT spacer sequence TTCN PAM
cuuuaggcccuguccuggca

SEQ ID NO: 37564 - RNA, 20 nt, Artificial Sequence
  HTT spacer sequence TTCN PAM
uccuggaggccggugagucc

SEQ ID NO: 37565 - RNA, 20 nt, Artificial Sequence
  HTT spacer sequence TTCN PAM
uggacggggacucaccggcc

SEQ ID NO: 37566 - RNA, 20 nt, Artificial Sequence
  HTT spacer sequence TTCN PAM
uaucauaguuccugucugcu

SEQ ID NO: 37567 - RNA, 20 nt, Artificial Sequence
  HTT spacer sequence TTCN PAM
ugucugcuucaccauguuuu

SEQ ID NO: 37568 - RNA, 20 nt, Artificial Sequence
  HTT spacer sequence TTCN PAM
ccauguuuuuauuuugugcu

SEQ ID NO: 37569 - RNA, 20 nt, Artificial Sequence
  HTT spacer sequence TTCN PAM
uagcuuaguaccuggcaaac

SEQ ID NO: 37570 - RNA, 20 nt, Artificial Sequence
  HTT spacer sequence TTCN PAM
ugaugcauauuuuaucuacc

SEQ ID NO: 37571 - RNA, 20 nt, Artificial Sequence
  HTT spacer sequence TTCN PAM
aguguagacuccaauauauu

SEQ ID NO: 37572 - RNA, 20 nt, Artificial Sequence
  HTT spacer sequence TTCN PAM
aguuaaauuccaguguagac

SEQ ID NO: 37573 - RNA, 20 nt, Artificial Sequence
  HTT spacer sequence TTCN PAM
aaaucuaaauaaaaugacua

SEQ ID NO: 37574 - RNA, 20 nt, Artificial Sequence
  HTT spacer sequence TTCN PAM
gcuuucaucaaaaauaccuc

SEQ ID NO: 37575 - RNA, 20 nt, Artificial Sequence
  HTT spacer sequence TTCN PAM
ucaaaaauaccucuaaacuu

SEQ ID NO: 37576 - RNA, 20 nt, Artificial Sequence
  HTT spacer sequence TTCN PAM
gaagauuauuuguuuucugu

SEQ ID NO: 37577 - RNA, 20 nt, Artificial Sequence
  HTT spacer sequence TTCN PAM
gaauguaauguuauuaaucu

SEQ ID NO: 37578 - RNA, 20 nt, Artificial Sequence
  HTT spacer sequence TTCN PAM
gucagaguuaaaauguuugu

SEQ ID NO: 37579 - RNA, 20 nt, Artificial Sequence
  HTT spacer sequence TTCN PAM
uuucaaggaacaguauccuc

SEQ ID NO: 37580 - RNA, 20 nt, Artificial Sequence
  HTT spacer sequence TTCN PAM
aggaacaguauccucaacaa

SEQ ID NO: 37581 - RNA, 20 nt, Artificial Sequence
  HTT spacer sequence TTCN PAM
uugaaaagaacaagccacuu

SEQ ID NO: 37582 - RNA, 20 nt, Artificial Sequence
  HTT spacer sequence TTCN PAM
aaacgcccucuaacauguaa

SEQ ID NO: 37583 - RNA, 20 nt, Artificial Sequence
  HTT spacer sequence TTCN PAM
uguuucauaauuguuuucau

SEQ ID NO: 37584 - RNA, 20 nt, Artificial Sequence
  HTT spacer sequence TTCN PAM
uaauuguuuucaucugugca

SEQ ID NO: 37585 - RNA, 20 nt, Artificial Sequence
  HTT spacer sequence TTCN PAM
ucugugcauuuguagccaac

SEQ ID NO: 37586 - RNA, 20 nt, Artificial Sequence
  HTT spacer sequence TTCN PAM
aguuggcuacaaaugcacag

SEQ ID NO: 37587 - RNA, 20 nt, Artificial Sequence
  HTT spacer sequence TTCN PAM
uggagguuauagugaugauu

SEQ ID NO: 37588 - RNA, 20 nt, Artificial Sequence
  HTT spacer sequence TTCN PAM
aagucccucgacugucuccu

SEQ ID NO: 37589 - RNA, 20 nt, Artificial Sequence
  HTT spacer sequence TTCN PAM
gauuucuaagucccucgacu

SEQ ID NO: 37590 - RNA, 20 nt, Artificial Sequence
  HTT spacer sequence TTCN PAM
uucagauuucuaagucccuc

SEQ ID NO: 37591 - RNA, 20 nt, Artificial Sequence
  HTT spacer sequence TTCN PAM
gauuucauucagauuucuaa

SEQ ID NO: 37592 - RNA, 20 nt, Artificial Sequence
  HTT spacer sequence TTCN PAM
aaucuucagacauauaccac

SEQ ID NO: 37593 - RNA, 20 nt, Artificial Sequence
  HTT spacer sequence TTCN PAM
gacauauaccacuaaccaag

SEQ ID NO: 37594 - RNA, 20 nt, Artificial Sequence
  HTT spacer sequence TTCN PAM
aaggaaucuaggcuagucug

SEQ ID NO: 37595 - RNA, 20 nt, Artificial Sequence
  HTT spacer sequence TTCN PAM
uuagaaccaauuuuagacaa

SEQ ID NO: 37596 - RNA, 20 nt, Artificial Sequence
  HTT spacer sequence TTCN PAM
acuuuugugaggcugcacaa

SEQ ID NO: 37597 - RNA, 20 nt, Artificial Sequence
  HTT spacer sequence TTCN PAM
acauuuuacauuugugcagc

SEQ ID NO: 37598 - RNA, 20 nt, Artificial Sequence
  HTT spacer sequence TTCN PAM
aucagugcuuuuuauucaac

SEQ ID NO: 37599 - RNA, 20 nt, Artificial Sequence
  HTT spacer sequence TTCN PAM
acacacuuccaucagugcuu

SEQ ID NO: 37600 - RNA, 20 nt, Artificial Sequence
  HTT spacer sequence TTCN PAM
ucucuuuguucuguuguaau

SEQ ID NO: 37601 - RNA, 20 nt, Artificial Sequence
  HTT spacer sequence TTCN PAM
cuuuguucuguuguaauuuu

SEQ ID NO: 37602 - RNA, 20 nt, Artificial Sequence
  HTT spacer sequence TTCN PAM
guuguaauuuuaguugcagu

SEQ ID NO: 37603 - RNA, 20 nt, Artificial Sequence
  HTT spacer sequence TTCN PAM
uaguccagaaagaaggacaa

SEQ ID NO: 37604 - RNA, 20 nt, Artificial Sequence
  HTT spacer sequence TTCN PAM
ggacuaagaagcugcucucc

SEQ ID NO: 37605 - RNA, 20 nt, Artificial Sequence
  HTT spacer sequence TTCN PAM
uucuggacuaagaagcugcu

SEQ ID NO: 37606 - RNA, 20 nt, Artificial Sequence
  HTT spacer sequence TTCN PAM
uccuccuccucgcugauggc

SEQ ID NO: 37607 - RNA, 20 nt, Artificial Sequence
  HTT spacer sequence TTCN PAM
uacauguuguuccuccagga

SEQ ID NO: 37608 - RNA, 20 nt, Artificial Sequence
  HTT spacer sequence TTCN PAM
uccaggacuuaaaaaucauu

SEQ ID NO: 37609 - RNA, 20 nt, Artificial Sequence
  HTT spacer sequence TTCN PAM
cagagacgugcaccgcggug

SEQ ID NO: 37610 - RNA, 20 nt, Artificial Sequence
  HTT spacer sequence TTCN PAM
aggaguccacacucaccgcg

SEQ ID NO: 37611 - RNA, 20 nt, Artificial Sequence
  HTT spacer sequence TTCN PAM
gagugaacaccuuauccgua

SEQ ID NO: 37612 - RNA, 20 nt, Artificial Sequence
  HTT spacer sequence TTCN PAM
cucggaaacaaaagagcugg

SEQ ID NO: 37613 - RNA, 20 nt, Artificial Sequence
  HTT spacer sequence TTCN PAM
ccccgcacuucccacacucu

SEQ ID NO: 37614 - RNA, 20 nt, Artificial Sequence
  HTT spacer sequence TTCN PAM
cacacucugcaguuauucug

SEQ ID NO: 37615 - RNA, 20 nt, Artificial Sequence
  HTT spacer sequence TTCN PAM
gagauccuugagggcaggga

SEQ ID NO: 37616 - RNA, 20 nt, Artificial Sequence
  HTT spacer sequence TTCN PAM
cugcccucaaggaucucaga

SEQ ID NO: 37617 - RNA, 20 nt, Artificial Sequence
  HTT spacer sequence TTCN PAM
uuguguucucagaaauuaau

SEQ ID NO: 37618 - RNA, 20 nt, Artificial Sequence
  HTT spacer sequence TTCN PAM
cagaaauuaaugcucggccu

SEQ ID NO: 37619 - RNA, 20 nt, Artificial Sequence
  HTT spacer sequence TTCN PAM
gagaacacaaagaagacaaa

SEQ ID NO: 37620 - RNA, 20 nt, Artificial Sequence
  HTT spacer sequence TTCN PAM
uuaucacucaacaaaagguu

SEQ ID NO: 37621 - RNA, 20 nt, Artificial Sequence
  HTT spacer sequence TTCN PAM
cacaugaguauucaguaacc

SEQ ID NO: 37622 - RNA, 20 nt, Artificial Sequence
  HTT spacer sequence TTCN PAM
guaaccucagugucagguuc

SEQ ID NO: 37623 - RNA, 20 nt, Artificial Sequence
  HTT spacer sequence TTCN PAM
gccaucuguuuugguggaua

SEQ ID NO: 37624 - RNA, 20 nt, Artificial Sequence
  HTT spacer sequence TTCN PAM
uuuaaauauccaccaaaaca

SEQ ID NO: 37625 - RNA, 20 nt, Artificial Sequence
  HTT spacer sequence TTCN PAM
gcuuuuccuacagaaaaaaa

SEQ ID NO: 37626 - RNA, 20 nt, Artificial Sequence
  HTT spacer sequence TTCN PAM
uacagaaaaaaaaaaaaauc

SEQ ID NO: 37627 - RNA, 20 nt, Artificial Sequence
  HTT spacer sequence TTCN PAM
guaggaaaagcggaauuuuc

SEQ ID NO: 37628 - RNA, 20 nt, Artificial Sequence
  HTT spacer sequence TTCN PAM
ugcacuuuccucccaauucu

SEQ ID NO: 37629 - RNA, 20 nt, Artificial Sequence
  HTT spacer sequence TTCN PAM
ucccaauucuagaguaggua

SEQ ID NO: 37630 - RNA, 20 nt, Artificial Sequence
  HTT spacer sequence TTCN PAM
agaguagguauuuuacuagg

SEQ ID NO: 37631 - RNA, 20 nt, Artificial Sequence
  HTT spacer sequence TTCN PAM
uaguaaaauaccuacucuag

SEQ ID NO: 37632 - RNA, 20 nt, Artificial Sequence
  HTT spacer sequence TTCN PAM
ucccaacaggcacugccacc

SEQ ID NO: 37633 - RNA, 20 nt, Artificial Sequence
  HTT spacer sequence TTCN PAM
uuggccaagugucuuuuguu

SEQ ID NO: 37634 - RNA, 20 nt, Artificial Sequence
  HTT spacer sequence TTCN PAM
ugccagggccccuaggcugc

SEQ ID NO: 37635 - RNA, 20 nt, Artificial Sequence
  HTT spacer sequence TTCN PAM
gcuucuuuagcccagugucu

SEQ ID NO: 37636 - RNA, 20 nt, Artificial Sequence
  HTT spacer sequence TTCN PAM
uuagcccagugucugguggg

SEQ ID NO: 37637 - RNA, 20 nt, Artificial Sequence
  HTT spacer sequence TTCN PAM
ccaccagacacugggcuaaa

SEQ ID NO: 37638 - RNA, 20 nt, Artificial Sequence
  HTT spacer sequence TTCN PAM
augcucuguggcucaggaaa

SEQ ID NO: 37639 - RNA, 20 nt, Artificial Sequence
  HTT spacer sequence TTCN PAM
ugagccacagagcauggaaa

SEQ ID NO: 37640 - RNA, 20 nt, Artificial Sequence
  HTT spacer sequence TTCN PAM
aucaugagugcaccagugcu

SEQ ID NO: 37641 - RNA, 20 nt, Artificial Sequence
  HTT spacer sequence TTCN PAM
ccccgcuuuugugcaauccu

SEQ ID NO: 37642 - RNA, 20 nt, Artificial Sequence
  HTT spacer sequence TTCN PAM
ugucuuuagucuucugcaua

SEQ ID NO: 37643 - RNA, 20 nt, Artificial Sequence
  HTT spacer sequence TTCN PAM
gcauaguacuuuucucuucu

SEQ ID NO: 37644 - RNA, 20 nt, Artificial Sequence
  HTT spacer sequence TTCN PAM
cuucugguucccgguucaag

SEQ ID NO: 37645 - RNA, 20 nt, Artificial Sequence
  HTT spacer sequence TTCN PAM
gguucccgguucaagguuuu

SEQ ID NO: 37646 - RNA, 20 nt, Artificial Sequence
  HTT spacer sequence TTCN PAM
cgguucaagguuuuguaauu

SEQ ID NO: 37647 - RNA, 20 nt, Artificial Sequence
  HTT spacer sequence TTCN PAM
agguuuuguaauuagagaau

SEQ ID NO: 37648 - RNA, 20 nt, Artificial Sequence
  HTT spacer sequence TTCN PAM
cuaauuacaaaaccuugaac

SEQ ID NO: 37649 - RNA, 20 nt, Artificial Sequence
  HTT spacer sequence TTCN PAM
gggucauucucuaauuacaa

SEQ ID NO: 37650 - RNA, 20 nt, Artificial Sequence
  HTT spacer sequence TTCN PAM
cugaauuuguaucucaaacc

SEQ ID NO: 37651 - RNA, 20 nt, Artificial Sequence
  HTT spacer sequence TTCN PAM
gagaaguccuuggcugugca

SEQ ID NO: 37652 - RNA, 20 nt, Artificial Sequence
  HTT spacer sequence TTCN PAM
ggcuucaguuugugauuuca

SEQ ID NO: 37653 - RNA, 20 nt, Artificial Sequence
  HTT spacer sequence TTCN PAM
guuugugauuucaugauuuc

SEQ ID NO: 37654 - RNA, 20 nt, Artificial Sequence
  HTT spacer sequence TTCN PAM
ugauuucuuguugcuaccua

SEQ ID NO: 37655 - RNA, 20 nt, Artificial Sequence
  HTT spacer sequence TTCN PAM
uguugcuaccuaaggaauau

SEQ ID NO: 37656 - RNA, 20 nt, Artificial Sequence
  HTT spacer sequence TTCN PAM
uuagguagcaacaagaaauc

SEQ ID NO: 37657 - RNA, 20 nt, Artificial Sequence
  HTT spacer sequence TTCN PAM
uauuccuuagguagcaacaa

SEQ ID NO: 37658 - RNA, 20 nt, Artificial Sequence
  HTT spacer sequence TTCN PAM
agccgaguggcaccucaggc

SEQ ID NO: 37659 - RNA, 20 nt, Artificial Sequence
  HTT spacer sequence TTCN PAM
guggugaggauaagaauagu

SEQ ID NO: 37660 - RNA, 20 nt, Artificial Sequence
  HTT spacer sequence TTCN PAM
uauccucaccacagaagcac

SEQ ID NO: 37661 - RNA, 20 nt, Artificial Sequence
  HTT spacer sequence TTCN PAM
auccacacgguuggcacuau

SEQ ID NO: 37662 - RNA, 20 nt, Artificial Sequence
  HTT spacer sequence TTCN PAM
aggugcuuuacauggaggga

SEQ ID NO: 37663 - RNA, 20 nt, Artificial Sequence
  HTT spacer sequence TTCN PAM
uaacaagacugucauccguu

SEQ ID NO: 37664 - RNA, 20 nt, Artificial Sequence
  HTT spacer sequence TTCN PAM
auugcuuuaaaacaguugag

SEQ ID NO: 37665 - RNA, 20 nt, Artificial Sequence
  HTT spacer sequence TTCN PAM
gggcccguugcucuaacuca

SEQ ID NO: 37666 - RNA, 20 nt, Artificial Sequence
  HTT spacer sequence TTCN PAM
guuugggugaagaugauuau

SEQ ID NO: 37667 - RNA, 20 nt, Artificial Sequence
  HTT spacer sequence TTCN PAM
cccaaacagaacccacuuca

SEQ ID NO: 37668 - RNA, 20 nt, Artificial Sequence
  HTT spacer sequence TTCN PAM
ccauggcccucuuuaggcaa

SEQ ID NO: 37669 - RNA, 20 nt, Artificial Sequence
  HTT spacer sequence TTCN PAM
cacucuugccuaaagagggc

SEQ ID NO: 37670 - RNA, 20 nt, Artificial Sequence
  HTT spacer sequence TTCN PAM
uuguuuuuuuaaucaccucg

SEQ ID NO: 37671 - RNA, 20 nt, Artificial Sequence
  HTT spacer sequence TTCN PAM
uaaaggucauccaauaaaua

SEQ ID NO: 37672 - RNA, 20 nt, Artificial Sequence
  HTT spacer sequence TTCN PAM
ccguuuuagcugggaugguc

SEQ ID NO: 37673 - RNA, 20 nt, Artificial Sequence
  HTT spacer sequence TTCN PAM
ccugccucagccucccaagu

SEQ ID NO: 37674 - RNA, 20 nt, Artificial Sequence
  HTT spacer sequence TTCN PAM
cgccauucuccugccucagc

SEQ ID NO: 37675 - RNA, 20 nt, Artificial Sequence
  HTT spacer sequence TTCN PAM
cauuggacuuaagcaauuaa

SEQ ID NO: 37676 - RNA, 20 nt, Artificial Sequence
  HTT spacer sequence TTCN PAM
cuauccuaggaaguugccca

SEQ ID NO: 37677 - RNA, 20 nt, Artificial Sequence
  HTT spacer sequence TTCN PAM
uaggauagagaaggacuucu

SEQ ID NO: 37678 - RNA, 20 nt, Artificial Sequence
  HTT spacer sequence TTCN PAM
acaguuugggcaacuuccua

SEQ ID NO: 37679 - RNA, 20 nt, Artificial Sequence
  HTT spacer sequence TTCN PAM
agacucaagacaccauucug

SEQ ID NO: 37680 - RNA, 20 nt, Artificial Sequence
  HTT spacer sequence TTCN PAM
guggaucuucccaagggugu

SEQ ID NO: 37681 - RNA, 20 nt, Artificial Sequence
  HTT spacer sequence TTCN PAM
caagggugugaaguguccac

SEQ ID NO: 37682 - RNA, 20 nt, Artificial Sequence
  HTT spacer sequence TTCN PAM
cacccuugggaagauccaca

SEQ ID NO: 37683 - RNA, 20 nt, Artificial Sequence
  HTT spacer sequence TTCN PAM
augcccaccagaaccaugcc

SEQ ID NO: 37684 - RNA, 20 nt, Artificial Sequence
  HTT spacer sequence TTCN PAM
ggugggcauggaaacuccca

SEQ ID NO: 37685 - RNA, 20 nt, Artificial Sequence
  HTT spacer sequence TTCN PAM
uaggucagagugcuugaggg

SEQ ID NO: 37686 - RNA, 20 nt, Artificial Sequence
  HTT spacer sequence TTCN PAM
cuggcuuuccuaggucagag

SEQ ID NO: 37687 - RNA, 20 nt, Artificial Sequence
  HTT spacer sequence TTCN PAM
cuggucucccaggaccugug

SEQ ID NO: 37688 - RNA, 20 nt, Artificial Sequence
  HTT spacer sequence TTCN PAM
uuuaggacaccuccucugcc

SEQ ID NO: 37689 - RNA, 20 nt, Artificial Sequence
  HTT spacer sequence TTCN PAM
agcugucacaggcugcugcu

SEQ ID NO: 37690 - RNA, 20 nt, Artificial Sequence
  HTT spacer sequence TTCN PAM
cagcccucuggcccacucuc

SEQ ID NO: 37691 - RNA, 20 nt, Artificial Sequence
  HTT spacer sequence TTCN PAM
ggaccauuccagcaauccca

SEQ ID NO: 37692 - RNA, 20 nt, Artificial Sequence
  HTT spacer sequence TTCN PAM
agcaaucccagcagaaaaug

SEQ ID NO: 37693 - RNA, 20 nt, Artificial Sequence
  HTT spacer sequence TTCN PAM
gcugggauugcuggaauggu

SEQ ID NO: 37694 - RNA, 20 nt, Artificial Sequence
  HTT spacer sequence TTCN PAM
ccccauuuucugcugggauu

SEQ ID NO: 37695 - RNA, 20 nt, Artificial Sequence
  HTT spacer sequence TTCN PAM
uauccgccuauaccauacaa

SEQ ID NO: 37696 - RNA, 20 nt, Artificial Sequence
  HTT spacer sequence TTCN PAM
accuucauauccgccuauac

SEQ ID NO: 37697 - RNA, 20 nt, Artificial Sequence
  HTT spacer sequence TTCN PAM
guggccaacucagagucuaa

SEQ ID NO: 37698 - RNA, 20 nt, Artificial Sequence
  HTT spacer sequence TTCN PAM
acaguuacagcuugagcagc

SEQ ID NO: 37699 - RNA, 20 nt, Artificial Sequence
  HTT spacer sequence TTCN PAM
acacugggcauauaggaugu

SEQ ID NO: 37700 - RNA, 20 nt, Artificial Sequence
  HTT spacer sequence TTCN PAM
gccaccaucucacaggcugc

SEQ ID NO: 37701 - RNA, 20 nt, Artificial Sequence
  HTT spacer sequence TTCN PAM
uuuuaugacccaaggccaac

SEQ ID NO: 37702 - RNA, 20 nt, Artificial Sequence
  HTT spacer sequence TTCN PAM
cacgccauugcuaaggaaca

SEQ ID NO: 37703 - RNA, 20 nt, Artificial Sequence
  HTT spacer sequence TTCN PAM
uuagcaauggcgugagaaac

SEQ ID NO: 37704 - RNA, 20 nt, Artificial Sequence
  HTT spacer sequence TTCN PAM
uugcagaagaccaaguacgg

SEQ ID NO: 37705 - RNA, 20 nt, Artificial Sequence
  HTT spacer sequence TTCN PAM
gcaaggaacgagcagacuca

SEQ ID NO: 37706 - RNA, 20 nt, Artificial Sequence
  HTT spacer sequence TTCN PAM
ccguacuuggucuucugcaa

SEQ ID NO: 37707 - RNA, 20 nt, Artificial Sequence
  HTT spacer sequence TTCN PAM
gucccgcccucucacgugug

SEQ ID NO: 37708 - RNA, 20 nt, Artificial Sequence
  HTT spacer sequence TTCN PAM
ggugcccacugugguucugg

SEQ ID NO: 37709 - RNA, 20 nt, Artificial Sequence
  HTT spacer sequence TTCN PAM
ggugccaggcugcuuuccuc

SEQ ID NO: 37710 - RNA, 20 nt, Artificial Sequence
  HTT spacer sequence TTCN PAM
ucaggcaccacguguggagg

SEQ ID NO: 37711 - RNA, 20 nt, Artificial Sequence
  HTT spacer sequence TTCN PAM
acuagcgaccuccacacgug

SEQ ID NO: 37712 - RNA, 20 nt, Artificial Sequence
  HTT spacer sequence TTCN PAM
aaaaugaacugaggcccuac

SEQ ID NO: 37713 - RNA, 20 nt, Artificial Sequence
  HTT spacer sequence TTCN PAM
uuuuagaaaacccaguauuu

SEQ ID NO: 37714 - RNA, 20 nt, Artificial Sequence
  HTT spacer sequence TTCN PAM
agagcaacuagaccacuuug

SEQ ID NO: 37715 - RNA, 20 nt, Artificial Sequence
  HTT spacer sequence TTCN PAM
ggucugcuauuaagcaaagu

SEQ ID NO: 37716 - RNA, 20 nt, Artificial Sequence
  HTT spacer sequence TTCN PAM
uuuggagauaauucauguuu

SEQ ID NO: 37717 - RNA, 20 nt, Artificial Sequence
  HTT spacer sequence TTCN PAM
uguuuuucuacacaguuuug

SEQ ID NO: 37718 - RNA, 20 nt, Artificial Sequence
  HTT spacer sequence TTCN PAM
acacaguuuugcaguugucu

SEQ ID NO: 37719 - RNA, 20 nt, Artificial Sequence
  HTT spacer sequence TTCN PAM
gaauugguuuaaaguaggug

SEQ ID NO: 37720 - RNA, 20 nt, Artificial Sequence
  HTT spacer sequence TTCN PAM
gaagacaacugcaaaacugu

SEQ ID NO: 37721 - RNA, 20 nt, Artificial Sequence
  HTT spacer sequence TTCN PAM
caaagugcugggauuacagg

SEQ ID NO: 37722 - RNA, 20 nt, Artificial Sequence
  HTT spacer sequence TTCN PAM
agaccagccuggccaacaug

SEQ ID NO: 37723 - RNA, 20 nt, Artificial Sequence
  HTT spacer sequence TTCN PAM
ccauguuggccaggcugguc

SEQ ID NO: 37724 - RNA, 20 nt, Artificial Sequence
  HTT spacer sequence TTCN PAM
ccugucucagucuccugagu

SEQ ID NO: 37725 - RNA, 20 nt, Artificial Sequence
  HTT spacer sequence TTCN PAM
agcgauucuccugucucagu

SEQ ID NO: 37726 - RNA, 20 nt, Artificial Sequence
  HTT spacer sequence TTCN PAM
ccuccuggguucaagcgauu

SEQ ID NO: 37727 - RNA, 20 nt, Artificial Sequence
  HTT spacer sequence TTCN PAM
gaucaauaacaccuaccuuu

SEQ ID NO: 37728 - RNA, 20 nt, Artificial Sequence
  HTT spacer sequence TTCN PAM
gauaacaugaggagcuuagc

SEQ ID NO: 37729 - RNA, 20 nt, Artificial Sequence
  HTT spacer sequence TTCN PAM
gcccagugaaauggcaucau

SEQ ID NO: 37730 - RNA, 20 nt, Artificial Sequence
  HTT spacer sequence TTCN PAM
cugggcagaagucagucccc

SEQ ID NO: 37731 - RNA, 20 nt, Artificial Sequence
  HTT spacer sequence TTCN PAM
gcgggcuggugggagaugau

SEQ ID NO: 37732 - RNA, 20 nt, Artificial Sequence
  HTT spacer sequence TTCN PAM
uuagggccugcagcauccuc

SEQ ID NO: 37733 - RNA, 20 nt, Artificial Sequence
  HTT spacer sequence TTCN PAM
ugccugaggaugcugcaggc

SEQ ID NO: 37734 - RNA, 20 nt, Artificial Sequence
  HTT spacer sequence TTCN PAM
uuccugccugaggaugcugc

SEQ ID NO: 37735 - RNA, 20 nt, Artificial Sequence
  HTT spacer sequence TTCN PAM
cccugaccuacaccugcugg

SEQ ID NO: 37736 - RNA, 20 nt, Artificial Sequence
  HTT spacer sequence TTCN PAM
cugggaccuggcuccauucu

SEQ ID NO: 37737 - RNA, 20 nt, Artificial Sequence
  HTT spacer sequence TTCN PAM
caggcagccacaagccucuu

SEQ ID NO: 37738 - RNA, 20 nt, Artificial Sequence
  HTT spacer sequence TTCN PAM
gccgcagggaaugaagguau

SEQ ID NO: 37739 - RNA, 20 nt, Artificial Sequence
  HTT spacer sequence TTCN PAM
cugcggcagaauccuuaucu

SEQ ID NO: 37740 - RNA, 20 nt, Artificial Sequence
  HTT spacer sequence TTCN PAM
uucccugcggcagaauccuu

SEQ ID NO: 37741 - RNA, 20 nt, Artificial Sequence
  HTT spacer sequence TTCN PAM
agauggcgggcuuauuccga

SEQ ID NO: 37742 - RNA, 20 nt, Artificial Sequence
  HTT spacer sequence TTCN PAM
gaagaagaggccagugccug

SEQ ID NO: 37743 - RNA, 20 nt, Artificial Sequence
  HTT spacer sequence TTCN PAM
gaauaagcccgccaucugga

SEQ ID NO: 37744 - RNA, 20 nt, Artificial Sequence
  HTT spacer sequence TTCN PAM
ucggaauaagcccgccaucu

SEQ ID NO: 37745 - RNA, 20 nt, Artificial Sequence
  HTT spacer sequence TTCN PAM
agcaccgccaggcacuggcc

SEQ ID NO: 37746 - RNA, 20 nt, Artificial Sequence
  HTT spacer sequence TTCN PAM
gcaacugcuuccagcaccgc

SEQ ID NO: 37747 - RNA, 20 nt, Artificial Sequence
  HTT spacer sequence TTCN PAM
ugggaagagagcagcagggg

SEQ ID NO: 37748 - RNA, 20 nt, Artificial Sequence
  HTT spacer sequence TTCN PAM
caggaaagccuacaacuccc

SEQ ID NO: 37749 - RNA, 20 nt, Artificial Sequence
  HTT spacer sequence TTCN PAM
ccagcaccccugcugcucuc

SEQ ID NO: 37750 - RNA, 20 nt, Artificial Sequence
  HTT spacer sequence TTCN PAM
uuagcaucugguuaugagac

SEQ ID NO: 37751 - RNA, 20 nt, Artificial Sequence
  HTT spacer sequence TTCN PAM
uccagcaagcucuucacugg

SEQ ID NO: 37752 - RNA, 20 nt, Artificial Sequence
  HTT spacer sequence TTCN PAM
cuggcauugaggaguucccu

SEQ ID NO: 37753 - RNA, 20 nt, Artificial Sequence
  HTT spacer sequence TTCN PAM
cugagugcggucaucuggaa

SEQ ID NO: 37754 - RNA, 20 nt, Artificial Sequence
  HTT spacer sequence TTCN PAM
agaugaccgcacucagggaa

SEQ ID NO: 37755 - RNA, 20 nt, Artificial Sequence
  HTT spacer sequence TTCN PAM
uguggugagguaagagauua

SEQ ID NO: 37756 - RNA, 20 nt, Artificial Sequence
  HTT spacer sequence TTCN PAM
cacagcccaucugcacaaag

SEQ ID NO: 37757 - RNA, 20 nt, Artificial Sequence
  HTT spacer sequence TTCN PAM
guuggguccuuugucaccuc

SEQ ID NO: 37758 - RNA, 20 nt, Artificial Sequence
  HTT spacer sequence TTCN PAM
gugaggugacaaaggaccca

SEQ ID NO: 37759 - RNA, 20 nt, Artificial Sequence
  HTT spacer sequence TTCN PAM
aguggcaggaucagcucacg

SEQ ID NO: 37760 - RNA, 20 nt, Artificial Sequence
  HTT spacer sequence TTCN PAM
ucugugcauggcacuugucu

SEQ ID NO: 37761 - RNA, 20 nt, Artificial Sequence
  HTT spacer sequence TTCN PAM
gugcauggcacuugucugag

SEQ ID NO: 37762 - RNA, 20 nt, Artificial Sequence
  HTT spacer sequence TTCN PAM
cugugcgugaggugcucaga

SEQ ID NO: 37763 - RNA, 20 nt, Artificial Sequence
  HTT spacer sequence TTCN PAM
gaguuuacagaaauaagcug

SEQ ID NO: 37764 - RNA, 20 nt, Artificial Sequence
  HTT spacer sequence TTCN PAM
guaaacucugaaguccaguu

SEQ ID NO: 37765 - RNA, 20 nt, Artificial Sequence
  HTT spacer sequence TTCN PAM
uuuucaugccugcuugccaa

SEQ ID NO: 37766 - RNA, 20 nt, Artificial Sequence
  HTT spacer sequence TTCN PAM
ugccugcuugccaauaaaca

SEQ ID NO: 37767 - RNA, 20 nt, Artificial Sequence
  HTT spacer sequence TTCN PAM
gcucagauauguuuauuggc

SEQ ID NO: 37768 - RNA, 20 nt, Artificial Sequence
  HTT spacer sequence TTCN PAM
augagguucagcucagauau

SEQ ID NO: 37769 - RNA, 20 nt, Artificial Sequence
  HTT spacer sequence TTCN PAM
agcacagcaccugcuguuug

SEQ ID NO: 37770 - RNA, 20 nt, Artificial Sequence
  HTT spacer sequence TTCN PAM
cccagcacucccugaguggg

SEQ ID NO: 37771 - RNA, 20 nt, Artificial Sequence
  HTT spacer sequence TTCN PAM
uguccucauccugaggcugc

SEQ ID NO: 37772 - RNA, 20 nt, Artificial Sequence
  HTT spacer sequence TTCN PAM
ccaucaaguggcccucccaa

SEQ ID NO: 37773 - RNA, 20 nt, Artificial Sequence
  HTT spacer sequence TTCN PAM
uuccccaucaaguggcccuc

SEQ ID NO: 37774 - RNA, 20 nt, Artificial Sequence
  HTT spacer sequence TTCN PAM
ugggacuuccuuccccauca

SEQ ID NO: 37775 - RNA, 20 nt, Artificial Sequence
  HTT spacer sequence TTCN PAM
gggggagaaggugccagcuc

SEQ ID NO: 37776 - RNA, 20 nt, Artificial Sequence
  HTT spacer sequence TTCN PAM
cccccagaaaacagcuccaa

SEQ ID NO: 37777 - RNA, 20 nt, Artificial Sequence
  HTT spacer sequence TTCN PAM
cuccacugggcucccuccuc

SEQ ID NO: 37778 - RNA, 20 nt, Artificial Sequence
  HTT spacer sequence TTCN PAM
ugcuuccucacaguaugucu

SEQ ID NO: 37779 - RNA, 20 nt, Artificial Sequence
  HTT spacer sequence TTCN PAM
ucacaguaugucuguccuga

SEQ ID NO: 37780 - RNA, 20 nt, Artificial Sequence
  HTT spacer sequence TTCN PAM
uuuucaucuucucaggugug

SEQ ID NO: 37781 - RNA, 20 nt, Artificial Sequence
  HTT spacer sequence TTCN PAM
ucuucucagguguggaagcu

SEQ ID NO: 37782 - RNA, 20 nt, Artificial Sequence
  HTT spacer sequence TTCN PAM
cagguguggaagcuuggaug

SEQ ID NO: 37783 - RNA, 20 nt, Artificial Sequence
  HTT spacer sequence TTCN PAM
acaccugagaagaugaaaag

SEQ ID NO: 37784 - RNA, 20 nt, Artificial Sequence
  HTT spacer sequence TTCN PAM
cugagauccccguggaguuc

SEQ ID NO: 37785 - RNA, 20 nt, Artificial Sequence
  HTT spacer sequence TTCN PAM
uccaggaaaaggaagucuuu

SEQ ID NO: 37786 - RNA, 20 nt, Artificial Sequence
  HTT spacer sequence TTCN PAM
uggaggaacuccacggggau

SEQ ID NO: 37787 - RNA, 20 nt, Artificial Sequence
  HTT spacer sequence TTCN PAM
uuuuccuggaggaacuccac

SEQ ID NO: 37788 - RNA, 20 nt, Artificial Sequence
  HTT spacer sequence TTCN PAM
ucuaccgcaucaacacacua

SEQ ID NO: 37789 - RNA, 20 nt, Artificial Sequence
  HTT spacer sequence TTCN PAM
ggucaccauugucggacauc

SEQ ID NO: 37790 - RNA, 20 nt, Artificial Sequence
  HTT spacer sequence TTCN PAM
ucccgguagauguccgacaa

SEQ ID NO: 37791 - RNA, 20 nt, Artificial Sequence
  HTT spacer sequence TTCN PAM
cauuugacuccagaaaagau

SEQ ID NO: 37792 - RNA, 20 nt, Artificial Sequence
  HTT spacer sequence TTCN PAM
ggagucaaaugagaagaucc

SEQ ID NO: 37793 - RNA, 20 nt, Artificial Sequence
  HTT spacer sequence TTCN PAM
cauagguuuguauuauuauc

SEQ ID NO: 37794 - RNA, 20 nt, Artificial Sequence
  HTT spacer sequence TTCN PAM
caguauaaaaggaguuuugc

SEQ ID NO: 37795 - RNA, 20 nt, Artificial Sequence
  HTT spacer sequence TTCN PAM
uguguuuuguggcuugaauc

SEQ ID NO: 37796 - RNA, 20 nt, Artificial Sequence
  HTT spacer sequence TTCN PAM
agccacaaaacacaggaacu

SEQ ID NO: 37797 - RNA, 20 nt, Artificial Sequence
  HTT spacer sequence TTCN PAM
gggcuuguuugaagucagga

SEQ ID NO: 37798 - RNA, 20 nt, Artificial Sequence
  HTT spacer sequence TTCN PAM
aacaagcccggaauacacaa

SEQ ID NO: 37799 - RNA, 20 nt, Artificial Sequence
  HTT spacer sequence TTCN PAM
ugacuucaaacaagcccgga

SEQ ID NO: 37800 - RNA, 20 nt, Artificial Sequence
  HTT spacer sequence TTCN PAM
uguguaguggacaacgugag

SEQ ID NO: 37801 - RNA, 20 nt, Artificial Sequence
  HTT spacer sequence TTCN PAM
gccuuagauuuugcauuuag

SEQ ID NO: 37802 - RNA, 20 nt, Artificial Sequence
  HTT spacer sequence TTCN PAM
gagacaagugcugccacugu

SEQ ID NO: 37803 - RNA, 20 nt, Artificial Sequence
  HTT spacer sequence TTCN PAM
uguguucaccagucugaucc

SEQ ID NO: 37804 - RNA, 20 nt, Artificial Sequence
  HTT spacer sequence TTCN PAM
ccagucugauccuguugugu

SEQ ID NO: 37805 - RNA, 20 nt, Artificial Sequence
  HTT spacer sequence TTCN PAM
cauaugggaacaagcagacg

SEQ ID NO: 37806 - RNA, 20 nt, Artificial Sequence
  HTT spacer sequence TTCN PAM
cauaugagaaaauggaccac

SEQ ID NO: 37807 - RNA, 20 nt, Artificial Sequence
  HTT spacer sequence TTCN PAM
uggcacucgccuuccccaga

SEQ ID NO: 37808 - RNA, 20 nt, Artificial Sequence
  HTT spacer sequence TTCN PAM
ccagagccuagaggcagcau

SEQ ID NO: 37809 - RNA, 20 nt, Artificial Sequence
  HTT spacer sequence TTCN PAM
ccccaugcugccucuaggcu

SEQ ID NO: 37810 - RNA, 20 nt, Artificial Sequence
  HTT spacer sequence TTCN PAM
agcccuccuaccugagcagc

SEQ ID NO: 37811 - RNA, 20 nt, Artificial Sequence
  HTT spacer sequence TTCN PAM
uagaauuguugcagauuuag

SEQ ID NO: 37812 - RNA, 20 nt, Artificial Sequence
  HTT spacer sequence TTCN PAM
augaaauagacacgaccccc

SEQ ID NO: 37813 - RNA, 20 nt, Artificial Sequence
  HTT spacer sequence TTCN PAM
aaaucugcaacaauucuaug

SEQ ID NO: 37814 - RNA, 20 nt, Artificial Sequence
  HTT spacer sequence TTCN PAM
aaacaaauguuaccccuuau

SEQ ID NO: 37815 - RNA, 20 nt, Artificial Sequence
  HTT spacer sequence TTCN PAM
aaauaagugucuaaaugaau

SEQ ID NO: 37816 - RNA, 20 nt, Artificial Sequence
  HTT spacer sequence TTCN PAM
uuuagacacuuauuuagaaa

SEQ ID NO: 37817 - RNA, 20 nt, Artificial Sequence
  HTT spacer sequence TTCN PAM
cagugacugugcccugcugu

SEQ ID NO: 37818 - RNA, 20 nt, Artificial Sequence
  HTT spacer sequence TTCN PAM
uggaauguuccugucuuguc

SEQ ID NO: 37819 - RNA, 20 nt, Artificial Sequence
  HTT spacer sequence TTCN PAM
aggaaacaccacagcagggc

SEQ ID NO: 37820 - RNA, 20 nt, Artificial Sequence
  HTT spacer sequence TTCN PAM
ugucuuguccuagaaagucu

SEQ ID NO: 37821 - RNA, 20 nt, Artificial Sequence
  HTT spacer sequence TTCN PAM
aggacaagacaggaacauuc

SEQ ID NO: 37822 - RNA, 20 nt, Artificial Sequence
  HTT spacer sequence TTCN PAM
gcagauuugaggcuuguuug

SEQ ID NO: 37823 - RNA, 20 nt, Artificial Sequence
  HTT spacer sequence TTCN PAM
gggauccaaacaagccucaa

SEQ ID NO: 37824 - RNA, 20 nt, Artificial Sequence
  HTT spacer sequence TTCN PAM
ccuuuauaauucaaugucca

SEQ ID NO: 37825 - RNA, 20 nt, Artificial Sequence
  HTT spacer sequence TTCN PAM
auguccaaagagagcccuga

SEQ ID NO: 37826 - RNA, 20 nt, Artificial Sequence
  HTT spacer sequence TTCN PAM
uggcugugaggaucgguauc

SEQ ID NO: 37827 - RNA, 20 nt, Artificial Sequence
  HTT spacer sequence TTCN PAM
agagcaagggcacccaagua

SEQ ID NO: 37828 - RNA, 20 nt, Artificial Sequence
  HTT spacer sequence TTCN PAM
uuguucauuuuuuucccugu

SEQ ID NO: 37829 - RNA, 20 nt, Artificial Sequence
  HTT spacer sequence TTCN PAM
uuuuuuucccuguaacguaa

SEQ ID NO: 37830 - RNA, 20 nt, Artificial Sequence
  HTT spacer sequence TTCN PAM
cuguaacguaaauuguuaua

SEQ ID NO: 37831 - RNA, 20 nt, Artificial Sequence
  HTT spacer sequence TTCN PAM
gacacagauacagacaaaua

SEQ ID NO: 37832 - RNA, 20 nt, Artificial Sequence
  HTT spacer sequence TTCN PAM
cucugucucuuguucuuucu

SEQ ID NO: 37833 - RNA, 20 nt, Artificial Sequence
  HTT spacer sequence TTCN PAM
uucuuuaccccguuuaucac

SEQ ID NO: 37834 - RNA, 20 nt, Artificial Sequence
  HTT spacer sequence TTCN PAM
uuaccccguuuaucacgggg

SEQ ID NO: 37835 - RNA, 20 nt, Artificial Sequence
  HTT spacer sequence TTCN PAM
ccuguccuaagcaccccauc

SEQ ID NO: 37836 - RNA, 20 nt, Artificial Sequence
  HTT spacer sequence TTCN PAM
uguccccaucaugaugucug

SEQ ID NO: 37837 - RNA, 20 nt, Artificial Sequence
  HTT spacer sequence TTCN PAM
gacagcugugcuucaugucc

SEQ ID NO: 37838 - RNA, 20 nt, Artificial Sequence
  HTT spacer sequence TTCN PAM
uuagauacacucgaaugcag

SEQ ID NO: 37839 - RNA, 20 nt, Artificial Sequence
  HTT spacer sequence TTCN PAM
aguguaucuaacgaacaguu

SEQ ID NO: 37840 - RNA, 20 nt, Artificial Sequence
  HTT spacer sequence TTCN PAM
cugaauccccguuccuaccu

SEQ ID NO: 37841 - RNA, 20 nt, Artificial Sequence
  HTT spacer sequence TTCN PAM
gugaaaauacauccgacaga

SEQ ID NO: 37842 - RNA, 20 nt, Artificial Sequence
  HTT spacer sequence TTCN PAM
uaccuugauacacucuuuuu

SEQ ID NO: 37843 - RNA, 20 nt, Artificial Sequence
  HTT spacer sequence TTCN PAM
ucuagacaggucagaggaac

SEQ ID NO: 37844 - RNA, 20 nt, Artificial Sequence
  HTT spacer sequence TTCN PAM
agacaggucagaggaaccau

SEQ ID NO: 37845 - RNA, 20 nt, Artificial Sequence
  HTT spacer sequence TTCN PAM
ucugaccugucuagaagaau

SEQ ID NO: 37846 - RNA, 20 nt, Artificial Sequence
  HTT spacer sequence TTCN PAM
accucaauaaagcugcuaaa

SEQ ID NO: 37847 - RNA, 20 nt, Artificial Sequence
  HTT spacer sequence TTCN PAM
cauacuacagauuucaccca

SEQ ID NO: 37848 - RNA, 20 nt, Artificial Sequence
  HTT spacer sequence TTCN PAM
cccacucuaagcggacagcu

SEQ ID NO: 37849 - RNA, 20 nt, Artificial Sequence
  HTT spacer sequence TTCN PAM
cuggaguccagcccugagac

SEQ ID NO: 37850 - RNA, 20 nt, Artificial Sequence
  HTT spacer sequence TTCN PAM
gccccacucacuaaaugggc

SEQ ID NO: 37851 - RNA, 20 nt, Artificial Sequence
  HTT spacer sequence TTCN PAM
guuuccucaaugaugaaaug

SEQ ID NO: 37852 - RNA, 20 nt, Artificial Sequence
  HTT spacer sequence TTCN PAM
ucaaugaugaaauggagggg

SEQ ID NO: 37853 - RNA, 20 nt, Artificial Sequence
  HTT spacer sequence TTCN PAM
ucauugaggaaaccgaagua

SEQ ID NO: 37854 - RNA, 20 nt, Artificial Sequence
  HTT spacer sequence TTCN PAM
ccgcaucauagaacugugug

SEQ ID NO: 37855 - RNA, 20 nt, Artificial Sequence
  HTT spacer sequence TTCN PAM
augaugcggggaacacuauc

SEQ ID NO: 37856 - RNA, 20 nt, Artificial Sequence
  HTT spacer sequence TTCN PAM
ccaggggccgugcugugucg

SEQ ID NO: 37857 - RNA, 20 nt, Artificial Sequence
  HTT spacer sequence TTCN PAM
caagccuguaacggagagcu

SEQ ID NO: 37858 - RNA, 20 nt, Artificial Sequence
  HTT spacer sequence TTCN PAM
aggcuggaccagucguacuc

SEQ ID NO: 37859 - RNA, 20 nt, Artificial Sequence
  HTT spacer sequence TTCN PAM
aacugaguacgacuggucca

SEQ ID NO: 37860 - RNA, 20 nt, Artificial Sequence
  HTT spacer sequence TTCN PAM
ucaaacugaguacgacuggu

SEQ ID NO: 37861 - RNA, 20 nt, Artificial Sequence
  HTT spacer sequence TTCN PAM
ggugggcucuccuccugcuc

SEQ ID NO: 37862 - RNA, 20 nt, Artificial Sequence
  HTT spacer sequence TTCN PAM
ccaccaaaggccugcaagcg

SEQ ID NO: 37863 - RNA, 20 nt, Artificial Sequence
  HTT spacer sequence TTCN PAM
uuuuuucucuuaccuuauuu

SEQ ID NO: 37864 - RNA, 20 nt, Artificial Sequence
  HTT spacer sequence TTCN PAM
cuuaccuuauuuuugaaaga

SEQ ID NO: 37865 - RNA, 20 nt, Artificial Sequence
  HTT spacer sequence TTCN PAM
aaaauaagguaagagaaaaa

SEQ ID NO: 37866 - RNA, 20 nt, Artificial Sequence
  HTT spacer sequence TTCN PAM
gcuacucuuucaaaaauaag

SEQ ID NO: 37867 - RNA, 20 nt, Artificial Sequence
  HTT spacer sequence TTCN PAM
agagcagggacaaagccugc

SEQ ID NO: 37868 - RNA, 20 nt, Artificial Sequence
  HTT spacer sequence TTCN PAM
agccauugguaaucgcagcc

SEQ ID NO: 37869 - RNA, 20 nt, Artificial Sequence
  HTT spacer sequence TTCN PAM
auguuaaggaucaauacgau

SEQ ID NO: 37870 - RNA, 20 nt, Artificial Sequence
  HTT spacer sequence TTCN PAM
ggaaaauaucuuuuaguuua

SEQ ID NO: 37871 - RNA, 20 nt, Artificial Sequence
  HTT spacer sequence TTCN PAM
agaaagggcacaaucguauu

SEQ ID NO: 37872 - RNA, 20 nt, Artificial Sequence
  HTT spacer sequence TTCN PAM
gaggaguguagguugaauua

SEQ ID NO: 37873 - RNA, 20 nt, Artificial Sequence
  HTT spacer sequence TTCN PAM
accuacacuccucugaauau

SEQ ID NO: 37874 - RNA, 20 nt, Artificial Sequence
  HTT spacer sequence TTCN PAM
uuuuaauucaaccuacacuc

SEQ ID NO: 37875 - RNA, 20 nt, Artificial Sequence
  HTT spacer sequence TTCN PAM
uuuuucuaaugucuugcaga

SEQ ID NO: 37876 - RNA, 20 nt, Artificial Sequence
  HTT spacer sequence TTCN PAM
aaugucuugcagagauuuua

SEQ ID NO: 37877 - RNA, 20 nt, Artificial Sequence
  HTT spacer sequence TTCN PAM
ugaaguguucacguacauua

SEQ ID NO: 37878 - RNA, 20 nt, Artificial Sequence
  HTT spacer sequence TTCN PAM
agaagccugauaaaaucucu

SEQ ID NO: 37879 - RNA, 20 nt, Artificial Sequence
  HTT spacer sequence TTCN PAM
cguacauuacgcuaacacga

SEQ ID NO: 37880 - RNA, 20 nt, Artificial Sequence
  HTT spacer sequence TTCN PAM
gcuggcuccgcuguaccaga

SEQ ID NO: 37881 - RNA, 20 nt, Artificial Sequence
  HTT spacer sequence TTCN PAM
cauucugcuggcuccgcugu

SEQ ID NO: 37882 - RNA, 20 nt, Artificial Sequence
  HTT spacer sequence TTCN PAM
acaacuucccauucugcugg

SEQ ID NO: 37883 - RNA, 20 nt, Artificial Sequence
  HTT spacer sequence TTCN PAM
gauagaaggugugguuugaa

SEQ ID NO: 37884 - RNA, 20 nt, Artificial Sequence
  HTT spacer sequence TTCN PAM
aucagaaucaagggccugca

SEQ ID NO: 37885 - RNA, 20 nt, Artificial Sequence
  HTT spacer sequence TTCN PAM
aaccacaccuucuaucagaa

SEQ ID NO: 37886 - RNA, 20 nt, Artificial Sequence
  HTT spacer sequence TTCN PAM
gugaguucaaaccacaccuu

SEQ ID NO: 37887 - RNA, 20 nt, Artificial Sequence
  HTT spacer sequence TTCN PAM
ugcauagaagcuaacagggu

SEQ ID NO: 37888 - RNA, 20 nt, Artificial Sequence
  HTT spacer sequence TTCN PAM
augcaugaauuuaaagacaa

SEQ ID NO: 37889 - RNA, 20 nt, Artificial Sequence
  HTT spacer sequence TTCN PAM
cucauacauuuuacaggccu

SEQ ID NO: 37890 - RNA, 20 nt, Artificial Sequence
  HTT spacer sequence TTCN PAM
aagauaauuuauuaaaaagu

SEQ ID NO: 37891 - RNA, 20 nt, Artificial Sequence
  HTT spacer sequence TTCN PAM
uguuuggaguuuugugccca

SEQ ID NO: 37892 - RNA, 20 nt, Artificial Sequence
  HTT spacer sequence TTCN PAM
aaucaaggacuccuuugggc

SEQ ID NO: 37893 - RNA, 20 nt, Artificial Sequence
  HTT spacer sequence TTCN PAM
gggcccgugugugcggaggc

SEQ ID NO: 37894 - RNA, 20 nt, Artificial Sequence
  HTT spacer sequence TTCN PAM
gucaggcugagcucacgggg

SEQ ID NO: 37895 - RNA, 20 nt, Artificial Sequence
  HTT spacer sequence TTCN PAM
ucccauugaggcagggaaga

SEQ ID NO: 37896 - RNA, 20 nt, Artificial Sequence
  HTT spacer sequence TTCN PAM
cugccucaaugggaggaaga

SEQ ID NO: 37897 - RNA, 20 nt, Artificial Sequence
  HTT spacer sequence TTCN PAM
gcaggcagaggugguugugg

SEQ ID NO: 37898 - RNA, 20 nt, Artificial Sequence
  HTT spacer sequence TTCN PAM
aggaagacacagagaggacc

SEQ ID NO: 37899 - RNA, 20 nt, Artificial Sequence
  HTT spacer sequence TTCN PAM
uggaaggagagcccacaugu

SEQ ID NO: 37900 - RNA, 20 nt, Artificial Sequence
  HTT spacer sequence TTCN PAM
ggggcugcugcuccaagcag

SEQ ID NO: 37901 - RNA, 20 nt, Artificial Sequence
  HTT spacer sequence TTCN PAM
gaggcuuguuccggggcugc

SEQ ID NO: 37902 - RNA, 20 nt, Artificial Sequence
  HTT spacer sequence TTCN PAM
cacgugucucugggacauag

SEQ ID NO: 37903 - RNA, 20 nt, Artificial Sequence
  HTT spacer sequence TTCN PAM
ccgcugaagcguccagcagc

SEQ ID NO: 37904 - RNA, 20 nt, Artificial Sequence
  HTT spacer sequence TTCN PAM
gcggggaacccacugucccc

SEQ ID NO: 37905 - RNA, 20 nt, Artificial Sequence
  HTT spacer sequence TTCN PAM
accaggccguuuuccuucau

SEQ ID NO: 37906 - RNA, 20 nt, Artificial Sequence
  HTT spacer sequence TTCN PAM
uucauugcuagaauugaaaa

SEQ ID NO: 37907 - RNA, 20 nt, Artificial Sequence
  HTT spacer sequence TTCN PAM
uugcuagaauugaaaacacc

SEQ ID NO: 37908 - RNA, 20 nt, Artificial Sequence
  HTT spacer sequence TTCN PAM
agcaaugaaggaaaacggcc

SEQ ID NO: 37909 - RNA, 20 nt, Artificial Sequence
  HTT spacer sequence TTCN PAM
auucuagcaaugaaggaaaa

SEQ ID NO: 37910 - RNA, 20 nt, Artificial Sequence
  HTT spacer sequence TTCN PAM
cacugaccaggaggccaccu

SEQ ID NO: 37911 - RNA, 20 nt, Artificial Sequence
  HTT spacer sequence TTCN PAM
agcuucucacugaccaggag

SEQ ID NO: 37912 - RNA, 20 nt, Artificial Sequence
  HTT spacer sequence TTCN PAM
ugucacguuuccagcuucuc

SEQ ID NO: 37913 - RNA, 20 nt, Artificial Sequence
  HTT spacer sequence TTCN PAM
ccuaaaugcucaauaacccc

SEQ ID NO: 37914 - RNA, 20 nt, Artificial Sequence
  HTT spacer sequence TTCN PAM
ugcucugcuaacgucuuccc

SEQ ID NO: 37915 - RNA, 20 nt, Artificial Sequence
  HTT spacer sequence TTCN PAM
acuaguugccugcucauucc

SEQ ID NO: 37916 - RNA, 20 nt, Artificial Sequence
  HTT spacer sequence TTCN PAM
uaagugagcaccuguccgug

SEQ ID NO: 37917 - RNA, 20 nt, Artificial Sequence
  HTT spacer sequence TTCN PAM
uuugguauuacaccagguuc

SEQ ID NO: 37918 - RNA, 20 nt, Artificial Sequence
  HTT spacer sequence TTCN PAM
uuuaggcaaagcggagggaa

SEQ ID NO: 37919 - RNA, 20 nt, Artificial Sequence
  HTT spacer sequence TTCN PAM
cuccgcuuugccuaaaggaa

SEQ ID NO: 37920 - RNA, 20 nt, Artificial Sequence
  HTT spacer sequence TTCN PAM
gguguuuuucacuuguaaga

SEQ ID NO: 37921 - RNA, 20 nt, Artificial Sequence
  HTT spacer sequence TTCN PAM
cuuguaagauuuugaaggaa

SEQ ID NO: 37922 - RNA, 20 nt, Artificial Sequence
  HTT spacer sequence TTCN PAM
aaaucuuacaagugaaaaac

SEQ ID NO: 37923 - RNA, 20 nt, Artificial Sequence
  HTT spacer sequence TTCN PAM
uucaaaaucuuacaagugaa

SEQ ID NO: 37924 - RNA, 20 nt, Artificial Sequence
  HTT spacer sequence TTCN PAM
aaaauguagguuugggagga

SEQ ID NO: 37925 - RNA, 20 nt, Artificial Sequence
  HTT spacer sequence TTCN PAM
ucccaaaccuacauuuuaga

SEQ ID NO: 37926 - RNA, 20 nt, Artificial Sequence
  HTT spacer sequence TTCN PAM
agcaaugguuucaaagagag

SEQ ID NO: 37927 - RNA, 20 nt, Artificial Sequence
  HTT spacer sequence TTCN PAM
aagagagagaauauugccac

SEQ ID NO: 37928 - RNA, 20 nt, Artificial Sequence
  HTT spacer sequence TTCN PAM
cucucuuugaaaccauugcu

SEQ ID NO: 37929 - RNA, 20 nt, Artificial Sequence
  HTT spacer sequence TTCN PAM
cugucuccggcuacuacagg

SEQ ID NO: 37930 - RNA, 20 nt, Artificial Sequence
  HTT spacer sequence TTCN PAM
cucagguaccuguaguagcc

SEQ ID NO: 37931 - RNA, 20 nt, Artificial Sequence
  HTT spacer sequence TTCN PAM
agcccaaguacaaccgcucc

SEQ ID NO: 37932 - RNA, 20 nt, Artificial Sequence
  HTT spacer sequence TTCN PAM
cucauucuagcccaaguaca

SEQ ID NO: 37933 - RNA, 20 nt, Artificial Sequence
  HTT spacer sequence TTCN PAM
cgcaucacugguguggugag

SEQ ID NO: 37934 - RNA, 20 nt, Artificial Sequence
  HTT spacer sequence TTCN PAM
uaagcaggagucuuagucag

SEQ ID NO: 37935 - RNA, 20 nt, Artificial Sequence
  HTT spacer sequence TTCN PAM
ucccugggccugacuaagac

SEQ ID NO: 37936 - RNA, 20 nt, Artificial Sequence
  HTT spacer sequence TTCN PAM
agauuuuacuuccucccugg

SEQ ID NO: 37937 - RNA, 20 nt, Artificial Sequence
  HTT spacer sequence TTCN PAM
uuuccagauuuuacuuccuc

SEQ ID NO: 37938 - RNA, 20 nt, Artificial Sequence
  HTT spacer sequence TTCN PAM
cauucauuuccagauuuuac

SEQ ID NO: 37939 - RNA, 20 nt, Artificial Sequence
  HTT spacer sequence TTCN PAM
cuccugccagucaagaaaug

SEQ ID NO: 37940 - RNA, 20 nt, Artificial Sequence
  HTT spacer sequence TTCN PAM
ugacuggcaggagagaaugc

SEQ ID NO: 37941 - RNA, 20 nt, Artificial Sequence
  HTT spacer sequence TTCN PAM
cauuucuugacuggcaggag

SEQ ID NO: 37942 - RNA, 20 nt, Artificial Sequence
  HTT spacer sequence TTCN PAM
cuucucauuucuugacuggc

SEQ ID NO: 37943 - RNA, 20 nt, Artificial Sequence
  HTT spacer sequence TTCN PAM
uucgcuucucauuucuugac

SEQ ID NO: 37944 - RNA, 20 nt, Artificial Sequence
  HTT spacer sequence TTCN PAM
cacgggcuguaagaccagca

SEQ ID NO: 37945 - RNA, 20 nt, Artificial Sequence
  HTT spacer sequence TTCN PAM
acuuuuaaauccugcugguc

SEQ ID NO: 37946 - RNA, 20 nt, Artificial Sequence
  HTT spacer sequence TTCN PAM
uaacauaagcaacuaauuca

SEQ ID NO: 37947 - RNA, 20 nt, Artificial Sequence
  HTT spacer sequence TTCN PAM
ucuacacaagcugaaucucc

SEQ ID NO: 37948 - RNA, 20 nt, Artificial Sequence
  HTT spacer sequence TTCN PAM
gcuuguguagaugaacuugg

SEQ ID NO: 37949 - RNA, 20 nt, Artificial Sequence
  HTT spacer sequence TTCN PAM
uaagaaaccauguguggcag

SEQ ID NO: 37950 - RNA, 20 nt, Artificial Sequence
  HTT spacer sequence TTCN PAM
uaggaaaagcuggagauuca

SEQ ID NO: 37951 - RNA, 20 nt, Artificial Sequence
  HTT spacer sequence TTCN PAM
gguugugugccugcccuauc

SEQ ID NO: 37952 - RNA, 20 nt, Artificial Sequence
  HTT spacer sequence TTCN PAM
uuuaaaccaggugacaagcu

SEQ ID NO: 37953 - RNA, 20 nt, Artificial Sequence
  HTT spacer sequence TTCN PAM
cucaaaaguauuuuagcgua

SEQ ID NO: 37954 - RNA, 20 nt, Artificial Sequence
  HTT spacer sequence TTCN PAM
guagcuauuuaggaguuuaa

SEQ ID NO: 37955 - RNA, 20 nt, Artificial Sequence
  HTT spacer sequence TTCN PAM
aggugcuuaaacuccuaaau

SEQ ID NO: 37956 - RNA, 20 nt, Artificial Sequence
  HTT spacer sequence TTCN PAM
gcaauuaaagccuucaaggu

SEQ ID NO: 37957 - RNA, 20 nt, Artificial Sequence
  HTT spacer sequence TTCN PAM
auguggacgugcaauguguu

SEQ ID NO: 37958 - RNA, 20 nt, Artificial Sequence
  HTT spacer sequence TTCN PAM
acgcccuaauaaacauuuga

SEQ ID NO: 37959 - RNA, 20 nt, Artificial Sequence
  HTT spacer sequence TTCN PAM
aggagcucauaagucaggag

SEQ ID NO: 37960 - RNA, 20 nt, Artificial Sequence
  HTT spacer sequence TTCN PAM
augacaggucauugcuccug

SEQ ID NO: 37961 - RNA, 20 nt, Artificial Sequence
  HTT spacer sequence TTCN PAM
gccuucuaugacaggucauu

SEQ ID NO: 37962 - RNA, 20 nt, Artificial Sequence
  HTT spacer sequence TTCN PAM
agggaagggggcguggaggc

SEQ ID NO: 37963 - RNA, 20 nt, Artificial Sequence
  HTT spacer sequence TTCN PAM
cuggaagcacuugcuccccu

SEQ ID NO: 37964 - RNA, 20 nt, Artificial Sequence
  HTT spacer sequence TTCN PAM
cgggcaccagccucccgcua

SEQ ID NO: 37965 - RNA, 20 nt, Artificial Sequence
  HTT spacer sequence TTCN PAM
gcugggcauccccccaauuc

SEQ ID NO: 37966 - RNA, 20 nt, Artificial Sequence
  HTT spacer sequence TTCN PAM
cacccccccacgccccaggc

SEQ ID NO: 37967 - RNA, 20 nt, Artificial Sequence
  HTT spacer sequence TTCN PAM
ggaaggcacuguucaccaaa

SEQ ID NO: 37968 - RNA, 20 nt, Artificial Sequence
  HTT spacer sequence TTCN PAM
agaaccccaccucggugccc

SEQ ID NO: 37969 - RNA, 20 nt, Artificial Sequence
  HTT spacer sequence TTCN PAM
ccaaaaugcuuaucuggguc

SEQ ID NO: 37970 - RNA, 20 nt, Artificial Sequence
  HTT spacer sequence TTCN PAM
uauucacagaggugggagcu

SEQ ID NO: 37971 - RNA, 20 nt, Artificial Sequence
  HTT spacer sequence TTCN PAM
cagaggugggagcugagggg

SEQ ID NO: 37972 - RNA, 20 nt, Artificial Sequence
  HTT spacer sequence TTCN PAM
cuaugacaaauaagacugca

SEQ ID NO: 37973 - RNA, 20 nt, Artificial Sequence
  HTT spacer sequence TTCN PAM
caggugcccucaucagccac

SEQ ID NO: 37974 - RNA, 20 nt, Artificial Sequence
  HTT spacer sequence TTCN PAM
cguggcugaugagggcaccu

SEQ ID NO: 37975 - RNA, 20 nt, Artificial Sequence
  HTT spacer sequence TTCN PAM
guccucagacuuuggcgcuu

SEQ ID NO: 37976 - RNA, 20 nt, Artificial Sequence
  HTT spacer sequence TTCN PAM
ccugggugugucaagcgcca

SEQ ID NO: 37977 - RNA, 20 nt, Artificial Sequence
  HTT spacer sequence TTCN PAM
uuuaaaaagugcacugagcu

SEQ ID NO: 37978 - RNA, 20 nt, Artificial Sequence
  HTT spacer sequence TTCN PAM
uuucauuuaaaaagugcacu

SEQ ID NO: 37979 - RNA, 20 nt, Artificial Sequence
  HTT spacer sequence TTCN PAM
uuuuuuuuaaaaaaaaauuu

SEQ ID NO: 37980 - RNA, 20 nt, Artificial Sequence
  HTT spacer sequence TTCN PAM
uuguuuuuaucuguuuuauu

SEQ ID NO: 37981 - RNA, 20 nt, Artificial Sequence
  HTT spacer sequence TTCN PAM
uaggucccgcaagcagagga

SEQ ID NO: 37982 - RNA, 20 nt, Artificial Sequence
  HTT spacer sequence TTCN PAM
ucugcuugcgggaccuagga

SEQ ID NO: 37983 - RNA, 20 nt, Artificial Sequence
  HTT spacer sequence TTCN PAM
guauuccagaaaguaguuaa

SEQ ID NO: 37984 - RNA, 20 nt, Artificial Sequence
  HTT spacer sequence TTCN PAM
agaaaguaguuaagagaccu

SEQ ID NO: 37985 - RNA, 20 nt, Artificial Sequence
  HTT spacer sequence TTCN PAM
ggaauacagaacauaaauaa

SEQ ID NO: 37986 - RNA, 20 nt, Artificial Sequence
  HTT spacer sequence TTCN PAM
gcugacuccacucuguccuc

SEQ ID NO: 37987 - RNA, 20 nt, Artificial Sequence
  HTT spacer sequence TTCN PAM
uccugagcauuucagcugac

SEQ ID NO: 37988 - RNA, 20 nt, Artificial Sequence
  HTT spacer sequence TTCN PAM
uggcgucuacuuccuccuga

SEQ ID NO: 37989 - RNA, 20 nt, Artificial Sequence
  HTT spacer sequence TTCN PAM
gggugggagccccgugugca

SEQ ID NO: 37990 - RNA, 20 nt, Artificial Sequence
  HTT spacer sequence TTCN PAM
uagcaggucacauuggucug

SEQ ID NO: 37991 - RNA, 20 nt, Artificial Sequence
  HTT spacer sequence TTCN PAM
guuuccuccucagauaagug

SEQ ID NO: 37992 - RNA, 20 nt, Artificial Sequence
  HTT spacer sequence TTCN PAM
uccucagauaagugaaggga

SEQ ID NO: 37993 - RNA, 20 nt, Artificial Sequence
  HTT spacer sequence TTCN PAM
cuuaucugaggaggaaacag

SEQ ID NO: 37994 - RNA, 20 nt, Artificial Sequence
  HTT spacer sequence TTCN PAM
agggucugggugugguggcu

SEQ ID NO: 37995 - RNA, 20 nt, Artificial Sequence
  HTT spacer sequence TTCN PAM
guuuacauuuuuuuuuaagg

SEQ ID NO: 37996 - RNA, 20 nt, Artificial Sequence
  HTT spacer sequence TTCN PAM
cuccaccccggugcuguguc

SEQ ID NO: 37997 - RNA, 20 nt, Artificial Sequence
  HTT spacer sequence TTCN PAM
cucaccggguuccugauuua

SEQ ID NO: 37998 - RNA, 20 nt, Artificial Sequence
  HTT spacer sequence TTCN PAM
ugauuuagugaaagcaguug

SEQ ID NO: 37999 - RNA, 20 nt, Artificial Sequence
  HTT spacer sequence TTCN PAM
cuaaaucaggaacccgguga

SEQ ID NO: 38000 - RNA, 20 nt, Artificial Sequence
  HTT spacer sequence TTCN PAM
cuuuguagcuuuuguuucug

SEQ ID NO: 38001 - RNA, 20 nt, Artificial Sequence
  HTT spacer sequence TTCN PAM
guggaaaugggucagaauau

SEQ ID NO: 38002 - RNA, 20 nt, Artificial Sequence
  HTT spacer sequence TTCN PAM
acagaaacaaaagcuacaaa

SEQ ID NO: 38003 - RNA, 20 nt, Artificial Sequence
  HTT spacer sequence TTCN PAM
gacccauuuccacagaaaca

SEQ ID NO: 38004 - RNA, 20 nt, Artificial Sequence
  HTT spacer sequence TTCN PAM
aaacaccauauucugaccca

SEQ ID NO: 38005 - RNA, 20 nt, Artificial Sequence
  HTT spacer sequence TTCN PAM
ucuucugaguuccuggccug

SEQ ID NO: 38006 - RNA, 20 nt, Artificial Sequence
  HTT spacer sequence TTCN PAM
gaguuccuggccugcagccu

SEQ ID NO: 38007 - RNA, 20 nt, Artificial Sequence
  HTT spacer sequence TTCN PAM
uggccugcagccuucacagc

SEQ ID NO: 38008 - RNA, 20 nt, Artificial Sequence
  HTT spacer sequence TTCN PAM
cagcagaaacccugugaugu

SEQ ID NO: 38009 - RNA, 20 nt, Artificial Sequence
  HTT spacer sequence TTCN PAM
gcugugaaggcugcaggcca

SEQ ID NO: 38010 - RNA, 20 nt, Artificial Sequence
  HTT spacer sequence TTCN PAM
guucccugcucucugccugu

SEQ ID NO: 38011 - RNA, 20 nt, Artificial Sequence
  HTT spacer sequence TTCN PAM
cugcucucugccuguacugu

SEQ ID NO: 38012 - RNA, 20 nt, Artificial Sequence
  HTT spacer sequence TTCN PAM
gugacaggaagcagggagcu

SEQ ID NO: 38013 - RNA, 20 nt, Artificial Sequence
  HTT spacer sequence TTCN PAM
ugucacugaaaccggcaggc

SEQ ID NO: 38014 - RNA, 20 nt, Artificial Sequence
  HTT spacer sequence TTCN PAM
agacauaguuggaaaaagaa

SEQ ID NO: 38015 - RNA, 20 nt, Artificial Sequence
  HTT spacer sequence TTCN PAM
aacuaugucuagaaaaauac

SEQ ID NO: 38016 - RNA, 20 nt, Artificial Sequence
  HTT spacer sequence TTCN PAM
uuuuccaacuaugucuagaa

SEQ ID NO: 38017 - RNA, 20 nt, Artificial Sequence
  HTT spacer sequence TTCN PAM
guccuuucaccuuugacaga

SEQ ID NO: 38018 - RNA, 20 nt, Artificial Sequence
  HTT spacer sequence TTCN PAM
ccuuugacagauguuuccac

SEQ ID NO: 38019 - RNA, 20 nt, Artificial Sequence
  HTT spacer sequence TTCN PAM
accccaagauaagugaaaau

SEQ ID NO: 38020 - RNA, 20 nt, Artificial Sequence
  HTT spacer sequence TTCN PAM
cuuaucuugggguggaaaca

SEQ ID NO: 38021 - RNA, 20 nt, Artificial Sequence
  HTT spacer sequence TTCN PAM
ugaaaguguuucugaagggc

SEQ ID NO: 38022 - RNA, 20 nt, Artificial Sequence
  HTT spacer sequence TTCN PAM
ugaaaaauacagugcauccu

SEQ ID NO: 38023 - RNA, 20 nt, Artificial Sequence
  HTT spacer sequence TTCN PAM
gaagggcaggcugagaguga

SEQ ID NO: 38024 - RNA, 20 nt, Artificial Sequence
  HTT spacer sequence TTCN PAM
gaaacacuuucaugaaaaau

SEQ ID NO: 38025 - RNA, 20 nt, Artificial Sequence
  HTT spacer sequence TTCN PAM
cuauccccccaaccccgcug

SEQ ID NO: 38026 - RNA, 20 nt, Artificial Sequence
  HTT spacer sequence TTCN PAM
auguuugcguuguguccagc

SEQ ID NO: 38027 - RNA, 20 nt, Artificial Sequence
  HTT spacer sequence TTCN PAM
gccccaguaugaucccauga

SEQ ID NO: 38028 - RNA, 20 nt, Artificial Sequence
  HTT spacer sequence TTCN PAM
gccccagacagggcaggggu

SEQ ID NO: 38029 - RNA, 20 nt, Artificial Sequence
  HTT spacer sequence TTCN PAM
gccccagacagggcaggggu

SEQ ID NO: 38030 - RNA, 20 nt, Artificial Sequence
  HTT spacer sequence TTCN PAM
gccccagacagggcaggggu

SEQ ID NO: 38031 - RNA, 20 nt, Artificial Sequence
  HTT spacer sequence TTCN PAM
gccccagacagggcaggggu

SEQ ID NO: 38032 - RNA, 20 nt, Artificial Sequence
  HTT spacer sequence TTCN PAM
cugucuggggcugaaggaca

SEQ ID NO: 38033 - RNA, 20 nt, Artificial Sequence
  HTT spacer sequence TTCN PAM
gccccagacagggaaggggu

SEQ ID NO: 38034 - RNA, 20 nt, Artificial Sequence
  HTT spacer sequence TTCN PAM
gccccagacagggcaggggu

SEQ ID NO: 38035 - RNA, 20 nt, Artificial Sequence
  HTT spacer sequence TTCN PAM
gccccagacagggcaggggu

SEQ ID NO: 38036 - RNA, 20 nt, Artificial Sequence
  HTT spacer sequence TTCN PAM
gccccagacagggcaggggu

SEQ ID NO: 38037 - RNA, 20 nt, Artificial Sequence
  HTT spacer sequence TTCN PAM
gccccagacagggcaggggu

SEQ ID NO: 38038 - RNA, 20 nt, Artificial Sequence
  HTT spacer sequence TTCN PAM
gccccagacagggcaggggu

SEQ ID NO: 38039 - RNA, 20 nt, Artificial Sequence
  HTT spacer sequence TTCN PAM
gccccagacagggcaggggu

SEQ ID NO: 38040 - RNA, 20 nt, Artificial Sequence
  HTT spacer sequence TTCN PAM
gccccagacagggcaggggu

SEQ ID NO: 38041 - RNA, 20 nt, Artificial Sequence
  HTT spacer sequence TTCN PAM
gccccagacagggcaggggu

SEQ ID NO: 38042 - RNA, 20 nt, Artificial Sequence
  HTT spacer sequence TTCN PAM
gccccagacagggcaggggu

SEQ ID NO: 38043 - RNA, 20 nt, Artificial Sequence
  HTT spacer sequence TTCN PAM
gccccagacagggcaggggu

SEQ ID NO: 38044 - RNA, 20 nt, Artificial Sequence
  HTT spacer sequence TTCN PAM
gccccagacagggcaggggu

SEQ ID NO: 38045 - RNA, 20 nt, Artificial Sequence
  HTT spacer sequence TTCN PAM
gccccagacagggcaggggu

SEQ ID NO: 38046 - RNA, 20 nt, Artificial Sequence
  HTT spacer sequence TTCN PAM
gccccagacagggcaggggu

SEQ ID NO: 38047 - RNA, 20 nt, Artificial Sequence
  HTT spacer sequence TTCN PAM
caaaagcaaguagcggcuca

SEQ ID NO: 38048 - RNA, 20 nt, Artificial Sequence
  HTT spacer sequence TTCN PAM
uacagacuccucgcccacuc

SEQ ID NO: 38049 - RNA, 20 nt, Artificial Sequence
  HTT spacer sequence TTCN PAM
ccccugggacccagcacccu

SEQ ID NO: 38050 - RNA, 20 nt, Artificial Sequence
  HTT spacer sequence TTCN PAM
uggcaccaagggccauuucc

SEQ ID NO: 38051 - RNA, 20 nt, Artificial Sequence
  HTT spacer sequence TTCN PAM
ccaucaucacuggcacuagc

SEQ ID NO: 38052 - RNA, 20 nt, Artificial Sequence
  HTT spacer sequence TTCN PAM
cgagaaccaggcagaaagga

SEQ ID NO: 38053 - RNA, 20 nt, Artificial Sequence
  HTT spacer sequence TTCN PAM
cgggaagccucgagcacuug

SEQ ID NO: 38054 - RNA, 20 nt, Artificial Sequence
  HTT spacer sequence TTCN PAM
gccugguucucgggaagccu

SEQ ID NO: 38055 - RNA, 20 nt, Artificial Sequence
  HTT spacer sequence TTCN PAM
agucucccgcacuggcaguc

SEQ ID NO: 38056 - RNA, 20 nt, Artificial Sequence
  HTT spacer sequence TTCN PAM
uuuuccagucucccgcacug

SEQ ID NO: 38057 - RNA, 20 nt, Artificial Sequence
  HTT spacer sequence TTCN PAM
guguuuuggggacuccauuc

SEQ ID NO: 38058 - RNA, 20 nt, Artificial Sequence
  HTT spacer sequence TTCN PAM
gaugucacuuaggagugaaa

SEQ ID NO: 38059 - RNA, 20 nt, Artificial Sequence
  HTT spacer sequence TTCN PAM
cuccuaagugacaucugaau

SEQ ID NO: 38060 - RNA, 20 nt, Artificial Sequence
  HTT spacer sequence TTCN PAM
uagagccucuuucuguguca

SEQ ID NO: 38061 - RNA, 20 nt, Artificial Sequence
  HTT spacer sequence TTCN PAM
gugucacccuccucagcugc

SEQ ID NO: 38062 - RNA, 20 nt, Artificial Sequence
  HTT spacer sequence TTCN PAM
ugccuuuagcaugugcugga

SEQ ID NO: 38063 - RNA, 20 nt, Artificial Sequence
  HTT spacer sequence TTCN PAM
cagcagcuguccagccccug

SEQ ID NO: 38064 - RNA, 20 nt, Artificial Sequence
  HTT spacer sequence TTCN PAM
gacaccccagguuacgggca

SEQ ID NO: 38065 - RNA, 20 nt, Artificial Sequence
  HTT spacer sequence TTCN PAM
guggcagguguccauacacu

SEQ ID NO: 38066 - RNA, 20 nt, Artificial Sequence
  HTT spacer sequence TTCN PAM
ccagccacacggaguguaug

SEQ ID NO: 38067 - RNA, 20 nt, Artificial Sequence
  HTT spacer sequence TTCN PAM
uccucccucaggggugugau

SEQ ID NO: 38068 - RNA, 20 nt, Artificial Sequence
  HTT spacer sequence TTCN PAM
ucgucccauuccuccucccu

SEQ ID NO: 38069 - RNA, 20 nt, Artificial Sequence
  HTT spacer sequence TTCN PAM
ucaccacccacgucuccagu

SEQ ID NO: 38070 - RNA, 20 nt, Artificial Sequence
  HTT spacer sequence TTCN PAM
aauggccuuuuucuuuuuaa

SEQ ID NO: 38071 - RNA, 20 nt, Artificial Sequence
  HTT spacer sequence TTCN PAM
uuuuaacagaaauuugaaau

SEQ ID NO: 38072 - RNA, 20 nt, Artificial Sequence
  HTT spacer sequence TTCN PAM
guuaaaaagaaaaaggccau

SEQ ID NO: 38073 - RNA, 20 nt, Artificial Sequence
  HTT spacer sequence TTCN PAM
aauuucuguuaaaaagaaaa

SEQ ID NO: 38074 - RNA, 20 nt, Artificial Sequence
  HTT spacer sequence TTCN PAM
uaucagucauuugauuuguu

SEQ ID NO: 38075 - RNA, 20 nt, Artificial Sequence
  HTT spacer sequence TTCN PAM
ugaaaugagccucucaucuc

SEQ ID NO: 38076 - RNA, 20 nt, Artificial Sequence
  HTT spacer sequence TTCN PAM
agaagcaccucaaacaaauc

SEQ ID NO: 38077 - RNA, 20 nt, Artificial Sequence
  HTT spacer sequence TTCN PAM
aaguacaugagaugagaggc

SEQ ID NO: 38078 - RNA, 20 nt, Artificial Sequence
  HTT spacer sequence TTCN PAM
acaggaaacaccgggcugga

SEQ ID NO: 38079 - RNA, 20 nt, Artificial Sequence
  HTT spacer sequence TTCN PAM
uguggaauaugcgagauggg

SEQ ID NO: 38080 - RNA, 20 nt, Artificial Sequence
  HTT spacer sequence TTCN PAM
caguuuuugcuugaguugua

SEQ ID NO: 38081 - RNA, 20 nt, Artificial Sequence
  HTT spacer sequence TTCN PAM
cauuccccucacaccugcac

SEQ ID NO: 38082 - RNA, 20 nt, Artificial Sequence
  HTT spacer sequence TTCN PAM
ccucacaccugcacgugcca

SEQ ID NO: 38083 - RNA, 20 nt, Artificial Sequence
  HTT spacer sequence TTCN PAM
uacacccaagagacauuacu

SEQ ID NO: 38084 - RNA, 20 nt, Artificial Sequence
  HTT spacer sequence TTCN PAM
ggaugcguugccuggauucu

SEQ ID NO: 38085 - RNA, 20 nt, Artificial Sequence
  HTT spacer sequence TTCN PAM
aacagcgcgauucuccccuu

SEQ ID NO: 38086 - RNA, 20 nt, Artificial Sequence
  HTT spacer sequence TTCN PAM
ccccuugcccuccugguuuu

SEQ ID NO: 38087 - RNA, 20 nt, Artificial Sequence
  HTT spacer sequence TTCN PAM
acaucuccagcuucuagugg

SEQ ID NO: 38088 - RNA, 20 nt, Artificial Sequence
  HTT spacer sequence TTCN PAM
aguggucucagacuuguuca

SEQ ID NO: 38089 - RNA, 20 nt, Artificial Sequence
  HTT spacer sequence TTCN PAM
ccgagcgcaaccaguuugag

SEQ ID NO: 38090 - RNA, 20 nt, Artificial Sequence
  HTT spacer sequence TTCN PAM
gucagcgucacauacaucag

SEQ ID NO: 38091 - RNA, 20 nt, Artificial Sequence
  HTT spacer sequence TTCN PAM
caguucugucagcgucacau

SEQ ID NO: 38092 - RNA, 20 nt, Artificial Sequence
  HTT spacer sequence TTCN PAM
gaagacgagauccucgcuca

SEQ ID NO: 38093 - RNA, 20 nt, Artificial Sequence
  HTT spacer sequence TTCN PAM
gaagggugcacccuucgcag

SEQ ID NO: 38094 - RNA, 20 nt, Artificial Sequence
  HTT spacer sequence TTCN PAM
gugcugaagccacgggggcc

SEQ ID NO: 38095 - RNA, 20 nt, Artificial Sequence
  HTT spacer sequence TTCN PAM
gcacagaaaccucugugcca

SEQ ID NO: 38096 - RNA, 20 nt, Artificial Sequence
  HTT spacer sequence TTCN PAM
aagaguugacccgaaccgga

SEQ ID NO: 38097 - RNA, 20 nt, Artificial Sequence
  HTT spacer sequence TTCN PAM
ggucaacucuuggaaggagg

SEQ ID NO: 38098 - RNA, 20 nt, Artificial Sequence
  HTT spacer sequence TTCN PAM
cagauggaggggguucagcg

SEQ ID NO: 38099 - RNA, 20 nt, Artificial Sequence
  HTT spacer sequence TTCN PAM
gcgacggucagugccauuca

SEQ ID NO: 38100 - RNA, 20 nt, Artificial Sequence
  HTT spacer sequence TTCN PAM
caggucacugugaugugggu

SEQ ID NO: 38101 - RNA, 20 nt, Artificial Sequence
  HTT spacer sequence TTCN PAM
guggggaugggcuacuacaa

SEQ ID NO: 38102 - RNA, 20 nt, Artificial Sequence
  HTT spacer sequence TTCN PAM
accaucuacgaugccucagc

SEQ ID NO: 38103 - RNA, 20 nt, Artificial Sequence
  HTT spacer sequence TTCN PAM
ccaugcucugcccugaggcc

SEQ ID NO: 38104 - RNA, 20 nt, Artificial Sequence
  HTT spacer sequence TTCN PAM
caguuauguuccaggccccc

SEQ ID NO: 38105 - RNA, 20 nt, Artificial Sequence
  HTT spacer sequence TTCN PAM
aggccccccgagcuuccugg

SEQ ID NO: 38106 - RNA, 20 nt, Artificial Sequence
  HTT spacer sequence TTCN PAM
uggcuggacagcuucucucc

SEQ ID NO: 38107 - RNA, 20 nt, Artificial Sequence
  HTT spacer sequence TTCN PAM
cuccugggggccguuuuguc

SEQ ID NO: 38108 - RNA, 20 nt, Artificial Sequence
  HTT spacer sequence TTCN PAM
agucccaaaucugggugcua

SEQ ID NO: 38109 - RNA, 20 nt, Artificial Sequence
  HTT spacer sequence TTCN PAM
acuguuuauaaauuacccag

SEQ ID NO: 38110 - RNA, 20 nt, Artificial Sequence
  HTT spacer sequence TTCN PAM
caccguucugggggcuggaa

SEQ ID NO: 38111 - RNA, 20 nt, Artificial Sequence
  HTT spacer sequence TTCN PAM
gggggcuggaaguuuucaug

SEQ ID NO: 38112 - RNA, 20 nt, Artificial Sequence
  HTT spacer sequence TTCN PAM
agcccccagaacggugagaa

SEQ ID NO: 38113 - RNA, 20 nt, Artificial Sequence
  HTT spacer sequence TTCN PAM
uggucaaggugccagcagau

SEQ ID NO: 38114 - RNA, 20 nt, Artificial Sequence
  HTT spacer sequence TTCN PAM
uagauggcaucuucuggcug

SEQ ID NO: 38115 - RNA, 20 nt, Artificial Sequence
  HTT spacer sequence TTCN PAM
ggcuggguccucacggugga

SEQ ID NO: 38116 - RNA, 20 nt, Artificial Sequence
  HTT spacer sequence TTCN PAM
accgugaggacccagccaga

SEQ ID NO: 38117 - RNA, 20 nt, Artificial Sequence
  HTT spacer sequence TTCN PAM
cuccuuccaccgugaggacc

SEQ ID NO: 38118 - RNA, 20 nt, Artificial Sequence
  HTT spacer sequence TTCN PAM
aaaaggccugagggagcuug

SEQ ID NO: 38119 - RNA, 20 nt, Artificial Sequence
  HTT spacer sequence TTCN PAM
uguacuguggcacugcaaau

SEQ ID NO: 38120 - RNA, 20 nt, Artificial Sequence
  HTT spacer sequence TTCN PAM
ggagggauagaaacauucag

SEQ ID NO: 38121 - RNA, 20 nt, Artificial Sequence
  HTT spacer sequence TTCN PAM
aucccuccugaaacuccuac

SEQ ID NO: 38122 - RNA, 20 nt, Artificial Sequence
  HTT spacer sequence TTCN PAM
gaccaucccagcggucaagu

SEQ ID NO: 38123 - RNA, 20 nt, Artificial Sequence
  HTT spacer sequence TTCN PAM
uccucuugaguuccuccuua

SEQ ID NO: 38124 - RNA, 20 nt, Artificial Sequence
  HTT spacer sequence TTCN PAM
uccuuauucugcuucugguu

SEQ ID NO: 38125 - RNA, 20 nt, Artificial Sequence
  HTT spacer sequence TTCN PAM
gcuucugguuuaucaggauu

SEQ ID NO: 38126 - RNA, 20 nt, Artificial Sequence
  HTT spacer sequence TTCN PAM
gguuuaucaggauucagcca

SEQ ID NO: 38127 - RNA, 20 nt, Artificial Sequence
  HTT spacer sequence TTCN PAM
gccagugcagcaugguaccu

SEQ ID NO: 38128 - RNA, 20 nt, Artificial Sequence
  HTT spacer sequence TTCN PAM
guggcacaucaccacauggu

SEQ ID NO: 38129 - RNA, 20 nt, Artificial Sequence
  HTT spacer sequence TTCN PAM
cgugugcaggugauggauac

SEQ ID NO: 38130 - RNA, 20 nt, Artificial Sequence
  HTT spacer sequence TTCN PAM
ccagaugucgggacccacgg

SEQ ID NO: 38131 - RNA, 20 nt, Artificial Sequence
  HTT spacer sequence TTCN PAM
aggauggcagaacugucaga

SEQ ID NO: 38132 - RNA, 20 nt, Artificial Sequence
  HTT spacer sequence TTCN PAM
gccauccuugaauaugcuuc

SEQ ID NO: 38133 - RNA, 20 nt, Artificial Sequence
  HTT spacer sequence TTCN PAM
uugucauguggcauuaccua

SEQ ID NO: 38134 - RNA, 20 nt, Artificial Sequence
  HTT spacer sequence TTCN PAM
auugcuaucauaaaauggau

SEQ ID NO: 38135 - RNA, 20 nt, Artificial Sequence
  HTT spacer sequence TTCN PAM
ucaacaaacaccugaguggc

SEQ ID NO: 38136 - RNA, 20 nt, Artificial Sequence
  HTT spacer sequence TTCN PAM
acaaacaccugaguggcugc

SEQ ID NO: 38137 - RNA, 20 nt, Artificial Sequence
  HTT spacer sequence TTCN PAM
caccaagggccccagacggc

SEQ ID NO: 38138 - RNA, 20 nt, Artificial Sequence
  HTT spacer sequence TTCN PAM
ugacacacaggagcccgucc

SEQ ID NO: 38139 - RNA, 20 nt, Artificial Sequence
  HTT spacer sequence TTCN PAM
ccgucaugacagcauugucg

SEQ ID NO: 38140 - RNA, 20 nt, Artificial Sequence
  HTT spacer sequence TTCN PAM
ucccgcacccccaccugaca

SEQ ID NO: 38141 - RNA, 20 nt, Artificial Sequence
  HTT spacer sequence TTCN PAM
cuuguggguguccuucagcc

SEQ ID NO: 38142 - RNA, 20 nt, Artificial Sequence
  HTT spacer sequence TTCN PAM
gccuggugccaugcugguga

SEQ ID NO: 38143 - RNA, 20 nt, Artificial Sequence
  HTT spacer sequence TTCN PAM
acucccuggacggcugcuga

SEQ ID NO: 38144 - RNA, 20 nt, Artificial Sequence
  HTT spacer sequence TTCN PAM
cugugugggcaucucucuuc

SEQ ID NO: 38145 - RNA, 20 nt, Artificial Sequence
  HTT spacer sequence TTCN PAM
cggcgaacacccucugggug

SEQ ID NO: 38146 - RNA, 20 nt, Artificial Sequence
  HTT spacer sequence TTCN PAM
ccgugaagagagaugcccac

SEQ ID NO: 38147 - RNA, 20 nt, Artificial Sequence
  HTT spacer sequence TTCN PAM
aagagccgcuuugacaucgu

SEQ ID NO: 38148 - RNA, 20 nt, Artificial Sequence
  HTT spacer sequence TTCN PAM
ccuuugugggaaguuucagc

SEQ ID NO: 38149 - RNA, 20 nt, Artificial Sequence
  HTT spacer sequence TTCN PAM
cacaaaggagaaggaccccu

SEQ ID NO: 38150 - RNA, 20 nt, Artificial Sequence
  HTT spacer sequence TTCN PAM
gcugcugggcuaacuugaau

SEQ ID NO: 38151 - RNA, 20 nt, Artificial Sequence
  HTT spacer sequence TTCN PAM
aguuagcccagcagcugaaa

SEQ ID NO: 38152 - RNA, 20 nt, Artificial Sequence
  HTT spacer sequence TTCN PAM
cauuugauuacugauggcac

SEQ ID NO: 38153 - RNA, 20 nt, Artificial Sequence
  HTT spacer sequence TTCN PAM
aaaugauuauuucucauuug

SEQ ID NO: 38154 - RNA, 20 nt, Artificial Sequence
  HTT spacer sequence TTCN PAM
ggaagauggccauccucugu

SEQ ID NO: 38155 - RNA, 20 nt, Artificial Sequence
  HTT spacer sequence TTCN PAM
agaaagcaugagugcacaaa

SEQ ID NO: 38156 - RNA, 20 nt, Artificial Sequence
  HTT spacer sequence TTCN PAM
cagaggauggccaucuucca

SEQ ID NO: 38157 - RNA, 20 nt, Artificial Sequence
  HTT spacer sequence TTCN PAM
gcgcgucaugcuugguaccc

SEQ ID NO: 38158 - RNA, 20 nt, Artificial Sequence
  HTT spacer sequence TTCN PAM
caacggugggcaaauaccuc

SEQ ID NO: 38159 - RNA, 20 nt, Artificial Sequence
  HTT spacer sequence TTCN PAM
gaagugggaccuggggccgu

SEQ ID NO: 38160 - RNA, 20 nt, Artificial Sequence
  HTT spacer sequence TTCN PAM
gaaagccccacaucaggacc

SEQ ID NO: 38161 - RNA, 20 nt, Artificial Sequence
  HTT spacer sequence TTCN PAM
ugggcccccaccucacccug

SEQ ID NO: 38162 - RNA, 20 nt, Artificial Sequence
  HTT spacer sequence TTCN PAM
uucuugggcccccaccucac

SEQ ID NO: 38163 - RNA, 20 nt, Artificial Sequence
  HTT spacer sequence TTCN PAM
uugugggucacuuccuucuu

SEQ ID NO: 38164 - RNA, 20 nt, Artificial Sequence
  HTT spacer sequence TTCN PAM
ugggauggcugggaguggcu

SEQ ID NO: 38165 - RNA, 20 nt, Artificial Sequence
  HTT spacer sequence TTCN PAM
gugucguccggccauuuccc

SEQ ID NO: 38166 - RNA, 20 nt, Artificial Sequence
  HTT spacer sequence TTCN PAM
ccugcggagaggcuccuacc

SEQ ID NO: 38167 - RNA, 20 nt, Artificial Sequence
  HTT spacer sequence TTCN PAM
cggcagugguaggagccucu

SEQ ID NO: 38168 - RNA, 20 nt, Artificial Sequence
  HTT spacer sequence TTCN PAM
acaaaaacaagaggccgccu

SEQ ID NO: 38169 - RNA, 20 nt, Artificial Sequence
  HTT spacer sequence TTCN PAM
cauggagcgcuggauggcca

SEQ ID NO: 38170 - RNA, 20 nt, Artificial Sequence
  HTT spacer sequence TTCN PAM
guguccccauagucuugggc

SEQ ID NO: 38171 - RNA, 20 nt, Artificial Sequence
  HTT spacer sequence TTCN PAM
gcccaagacuauggggacac

SEQ ID NO: 38172 - RNA, 20 nt, Artificial Sequence
  HTT spacer sequence TTCN PAM
uugcugacuucugcaggggu

SEQ ID NO: 38173 - RNA, 20 nt, Artificial Sequence
  HTT spacer sequence TTCN PAM
gcaggggucuccucacuguu

SEQ ID NO: 38174 - RNA, 20 nt, Artificial Sequence
  HTT spacer sequence TTCN PAM
aucugcucuuuaacagugag

SEQ ID NO: 38175 - RNA, 20 nt, Artificial Sequence
  HTT spacer sequence TTCN PAM
cuuucaaucugcucuuuaac

SEQ ID NO: 38176 - RNA, 20 nt, Artificial Sequence
  HTT spacer sequence TTCN PAM
ucacuuucaaucugcucuuu

SEQ ID NO: 38177 - RNA, 20 nt, Artificial Sequence
  HTT spacer sequence TTCN PAM
cuuaguauccaaaaccuagc

SEQ ID NO: 38178 - RNA, 20 nt, Artificial Sequence
  HTT spacer sequence TTCN PAM
accaaaauggccucaauuuc

SEQ ID NO: 38179 - RNA, 20 nt, Artificial Sequence
  HTT spacer sequence TTCN PAM
gucaacuucaaccaaaaugg

SEQ ID NO: 38180 - RNA, 20 nt, Artificial Sequence
  HTT spacer sequence TTCN PAM
agaaagacucucagcuaaga

SEQ ID NO: 38181 - RNA, 20 nt, Artificial Sequence
  HTT spacer sequence TTCN PAM
agaaaagccugggguagucu

SEQ ID NO: 38182 - RNA, 20 nt, Artificial Sequence
  HTT spacer sequence TTCN PAM
uugcugauuuuguuuugugu

SEQ ID NO: 38183 - RNA, 20 nt, Artificial Sequence
  HTT spacer sequence TTCN PAM
agaauccucucccagcgggg

SEQ ID NO: 38184 - RNA, 20 nt, Artificial Sequence
  HTT spacer sequence TTCN PAM
ggaagcucaagccugguguc

SEQ ID NO: 38185 - RNA, 20 nt, Artificial Sequence
  HTT spacer sequence TTCN PAM
uggcgacgacacugcacacg

SEQ ID NO: 38186 - RNA, 20 nt, Artificial Sequence
  HTT spacer sequence TTCN PAM
cuccgggaguccagagucug

SEQ ID NO: 38187 - RNA, 20 nt, Artificial Sequence
  HTT spacer sequence TTCN PAM
cagcaccaacccuggugccc

SEQ ID NO: 38188 - RNA, 20 nt, Artificial Sequence
  HTT spacer sequence TTCN PAM
gcacacaagcgugagggcag

SEQ ID NO: 38189 - RNA, 20 nt, Artificial Sequence
  HTT spacer sequence TTCN PAM
gguuggagaggagauagucg

SEQ ID NO: 38190 - RNA, 20 nt, Artificial Sequence
  HTT spacer sequence TTCN PAM
gagacccccgccccagcccc

SEQ ID NO: 38191 - RNA, 20 nt, Artificial Sequence
  HTT spacer sequence TTCN PAM
cagcucauucugagaccccc

SEQ ID NO: 38192 - RNA, 20 nt, Artificial Sequence
  HTT spacer sequence TTCN PAM
uucacagcucauucugagac

SEQ ID NO: 38193 - RNA, 20 nt, Artificial Sequence
  HTT spacer sequence TTCN PAM
cacugauaccuggccugcca

SEQ ID NO: 38194 - RNA, 20 nt, Artificial Sequence
  HTT spacer sequence TTCN PAM
ucgggcaccuccagcgagcu

SEQ ID NO: 38195 - RNA, 20 nt, Artificial Sequence
  HTT spacer sequence TTCN PAM
ugacucugcucucgaggcca

SEQ ID NO: 38196 - RNA, 20 nt, Artificial Sequence
  HTT spacer sequence TTCN PAM
cugcucccagaacccuguua

SEQ ID NO: 38197 - RNA, 20 nt, Artificial Sequence
  HTT spacer sequence TTCN PAM
gggagcagagaaugagagcc

SEQ ID NO: 38198 - RNA, 20 nt, Artificial Sequence
  HTT spacer sequence TTCN PAM
ccgcccuggcccaguaccuc

SEQ ID NO: 38199 - RNA, 20 nt, Artificial Sequence
  HTT spacer sequence TTCN PAM
acugugauuccgaccucacc

SEQ ID NO: 38200 - RNA, 20 nt, Artificial Sequence
  HTT spacer sequence TTCN PAM
gaccucaccuuaucuuaaag

SEQ ID NO: 38201 - RNA, 20 nt, Artificial Sequence
  HTT spacer sequence TTCN PAM
guacacacguguccuugaca

SEQ ID NO: 38202 - RNA, 20 nt, Artificial Sequence
  HTT spacer sequence TTCN PAM
cagcgaugucuuacaagcgc

SEQ ID NO: 38203 - RNA, 20 nt, Artificial Sequence
  HTT spacer sequence TTCN PAM
aaagucgcagaggcuuuagc

SEQ ID NO: 38204 - RNA, 20 nt, Artificial Sequence
  HTT spacer sequence TTCN PAM
gcacacgggagcugucuuua

SEQ ID NO: 38205 - RNA, 20 nt, Artificial Sequence
  HTT spacer sequence TTCN PAM
acccucccucuaaagacagc

SEQ ID NO: 38206 - RNA, 20 nt, Artificial Sequence
  HTT spacer sequence TTCN PAM
ucagccacccacauggggga

SEQ ID NO: 38207 - RNA, 20 nt, Artificial Sequence
  HTT spacer sequence TTCN PAM
ugcccucaacucccccaugu

SEQ ID NO: 38208 - RNA, 20 nt, Artificial Sequence
  HTT spacer sequence TTCN PAM
caucuuugcuccuaauucuu

SEQ ID NO: 38209 - RNA, 20 nt, Artificial Sequence
  HTT spacer sequence TTCN PAM
ucccagaccccuucccaucu

SEQ ID NO: 38210 - RNA, 20 nt, Artificial Sequence
  HTT spacer sequence TTCN PAM
ugcccacuugucaaagggga

SEQ ID NO: 38211 - RNA, 20 nt, Artificial Sequence
  HTT spacer sequence TTCN PAM
acucaacuuugaccuagccc

SEQ ID NO: 38212 - RNA, 20 nt, Artificial Sequence
  HTT spacer sequence TTCN PAM
cgucucccuccaggucuucc

SEQ ID NO: 38213 - RNA, 20 nt, Artificial Sequence
  HTT spacer sequence TTCN PAM
gacaggagggaggugugagc

SEQ ID NO: 38214 - RNA, 20 nt, Artificial Sequence
  HTT spacer sequence TTCN PAM
cgccugucauccuugcuggg

SEQ ID NO: 38215 - RNA, 20 nt, Artificial Sequence
  HTT spacer sequence TTCN PAM
ggggcugccccccaaaauca

SEQ ID NO: 38216 - RNA, 20 nt, Artificial Sequence
  HTT spacer sequence TTCN PAM
auggcucuugcugugggcau

SEQ ID NO: 38217 - RNA, 20 nt, Artificial Sequence
  HTT spacer sequence TTCN PAM
cugaguccuccaugcccaca

SEQ ID NO: 38218 - RNA, 20 nt, Artificial Sequence
  HTT spacer sequence TTCN PAM
accuggaugccacaagcucu

SEQ ID NO: 38219 - RNA, 20 nt, Artificial Sequence
  HTT spacer sequence TTCN PAM
caguggccacucauucaguc

SEQ ID NO: 38220 - RNA, 20 nt, Artificial Sequence
  HTT spacer sequence TTCN PAM
gucccuggcuaccagguccu

SEQ ID NO: 38221 - RNA, 20 nt, Artificial Sequence
  HTT spacer sequence TTCN PAM
ccauggcacagugaggaccu

SEQ ID NO: 38222 - RNA, 20 nt, Artificial Sequence
  HTT spacer sequence TTCN PAM
gugaucccccgacagcgccg

SEQ ID NO: 38223 - RNA, 20 nt, Artificial Sequence
  HTT spacer sequence TTCN PAM
uggcacaugccaucaugacg

SEQ ID NO: 38224 - RNA, 20 nt, Artificial Sequence
  HTT spacer sequence TTCN PAM
uucauggcacaugccaucau

SEQ ID NO: 38225 - RNA, 20 nt, Artificial Sequence
  HTT spacer sequence TTCN PAM
ugagugcccugugcuuuucc

SEQ ID NO: 38226 - RNA, 20 nt, Artificial Sequence
  HTT spacer sequence TTCN PAM
cacaccccaggccagucccc

SEQ ID NO: 38227 - RNA, 20 nt, Artificial Sequence
  HTT spacer sequence TTCN PAM
ucucucugucccucaacgag

SEQ ID NO: 38228 - RNA, 20 nt, Artificial Sequence
  HTT spacer sequence TTCN PAM
gccucugcuugaccacuccc

SEQ ID NO: 38229 - RNA, 20 nt, Artificial Sequence
  HTT spacer sequence TTCN PAM
cagcauguccggccccacgc

SEQ ID NO: 38230 - RNA, 20 nt, Artificial Sequence
  HTT spacer sequence TTCN PAM
gcugcgugaacauucacagc

SEQ ID NO: 38231 - RNA, 20 nt, Artificial Sequence
  HTT spacer sequence TTCN PAM
cgcagcugaaaacgggagac

SEQ ID NO: 38232 - RNA, 20 nt, Artificial Sequence
  HTT spacer sequence TTCN PAM
cagccagcagcacguacugg

SEQ ID NO: 38233 - RNA, 20 nt, Artificial Sequence
  HTT spacer sequence TTCN PAM
caaugagguaaaacgcagug

SEQ ID NO: 38234 - RNA, 20 nt, Artificial Sequence
  HTT spacer sequence TTCN PAM
ggcccuacguccagaggaua

SEQ ID NO: 38235 - RNA, 20 nt, Artificial Sequence
  HTT spacer sequence TTCN PAM
gcaucaauaauacaggugag

SEQ ID NO: 38236 - RNA, 20 nt, Artificial Sequence
  HTT spacer sequence TTCN PAM
ucugcacacggggagugggc

SEQ ID NO: 38237 - RNA, 20 nt, Artificial Sequence
  HTT spacer sequence TTCN PAM
cuucucuuuuccuugcagga

SEQ ID NO: 38238 - RNA, 20 nt, Artificial Sequence
  HTT spacer sequence TTCN PAM
cuuuuccuugcaggaucaua

SEQ ID NO: 38239 - RNA, 20 nt, Artificial Sequence
  HTT spacer sequence TTCN PAM
uugcaggaucauaccagugg

SEQ ID NO: 38240 - RNA, 20 nt, Artificial Sequence
  HTT spacer sequence TTCN PAM
ugccuccucccgaccaaguc

SEQ ID NO: 38241 - RNA, 20 nt, Artificial Sequence
  HTT spacer sequence TTCN PAM
uugacacagaggccuuucuc

SEQ ID NO: 38242 - RNA, 20 nt, Artificial Sequence
  HTT spacer sequence TTCN PAM
cccugugcagaugugugggg

SEQ ID NO: 38243 - RNA, 20 nt, Artificial Sequence
  HTT spacer sequence TTCN PAM
agacagcaucaccccacaca

SEQ ID NO: 38244 - RNA, 20 nt, Artificial Sequence
  HTT spacer sequence TTCN PAM
gcauccaggcgggagagcug

SEQ ID NO: 38245 - RNA, 20 nt, Artificial Sequence
  HTT spacer sequence TTCN PAM
cucuguccacacucagcuug

SEQ ID NO: 38246 - RNA, 20 nt, Artificial Sequence
  HTT spacer sequence TTCN PAM
agggaggcaggagcaugcuc

SEQ ID NO: 38247 - RNA, 20 nt, Artificial Sequence
  HTT spacer sequence TTCN PAM
cacuucugguguugccccaa

SEQ ID NO: 38248 - RNA, 20 nt, Artificial Sequence
  HTT spacer sequence TTCN PAM
gguguugccccaagccggcc

SEQ ID NO: 38249 - RNA, 20 nt, Artificial Sequence
  HTT spacer sequence TTCN PAM
ugcaaggugauggggccggc

SEQ ID NO: 38250 - RNA, 20 nt, Artificial Sequence
  HTT spacer sequence TTCN PAM
gaucuccagggacucacugg

SEQ ID NO: 38251 - RNA, 20 nt, Artificial Sequence
  HTT spacer sequence TTCN PAM
uacugaacacuuuuguuaca

SEQ ID NO: 38252 - RNA, 20 nt, Artificial Sequence
  HTT spacer sequence TTCN PAM
guacgaagguuaccucuaua

SEQ ID NO: 38253 - RNA, 20 nt, Artificial Sequence
  HTT spacer sequence TTCN PAM
uguaacaaaaguguucagua

SEQ ID NO: 38254 - RNA, 20 nt, Artificial Sequence
  HTT spacer sequence TTCN PAM
ccuuuccuguaacaaaagug

SEQ ID NO: 38255 - RNA, 20 nt, Artificial Sequence
  HTT spacer sequence TTCN PAM
acccggacugacuuucuccu

SEQ ID NO: 38256 - RNA, 20 nt, Artificial Sequence
  HTT spacer sequence TTCN PAM
gacccuaauccugcagcccc

SEQ ID NO: 38257 - RNA, 20 nt, Artificial Sequence
  HTT spacer sequence TTCN PAM
uuuugauagguaagaagcga

SEQ ID NO: 38258 - RNA, 20 nt, Artificial Sequence
  HTT spacer sequence TTCN PAM
uaccuaucaaaaagaacaga

SEQ ID NO: 38259 - RNA, 20 nt, Artificial Sequence
  HTT spacer sequence TTCN PAM
cuucuuaccuaucaaaaaga

SEQ ID NO: 38260 - RNA, 20 nt, Artificial Sequence
  HTT spacer sequence TTCN PAM
cuagaacuuuggccugaagc

SEQ ID NO: 38261 - RNA, 20 nt, Artificial Sequence
  HTT spacer sequence TTCN PAM
agggaagcuaacggcugagg

SEQ ID NO: 38262 - RNA, 20 nt, Artificial Sequence
  HTT spacer sequence TTCN PAM
ggccaaaguucuagggaagc

SEQ ID NO: 38263 - RNA, 20 nt, Artificial Sequence
  HTT spacer sequence TTCN PAM
ccaccacagccugaccaugg

SEQ ID NO: 38264 - RNA, 20 nt, Artificial Sequence
  HTT spacer sequence TTCN PAM
acuggcgagcuggugguccu

SEQ ID NO: 38265 - RNA, 20 nt, Artificial Sequence
  HTT spacer sequence TTCN PAM
aagguugucccagugccugc

SEQ ID NO: 38266 - RNA, 20 nt, Artificial Sequence
  HTT spacer sequence TTCN PAM
ugcccccugccacaccccca

SEQ ID NO: 38267 - RNA, 20 nt, Artificial Sequence
  HTT spacer sequence TTCN PAM
gccccacccucccagaggcu

SEQ ID NO: 38268 - RNA, 20 nt, Artificial Sequence
  HTT spacer sequence TTCN PAM
uccuccugccgcugcuccuc

SEQ ID NO: 38269 - RNA, 20 nt, Artificial Sequence
  HTT spacer sequence TTCN PAM
accuucauccuccugccgcu

SEQ ID NO: 38270 - RNA, 20 nt, Artificial Sequence
  HTT spacer sequence TTCN PAM
gccccccaccaccccccacu

SEQ ID NO: 38271 - RNA, 20 nt, Artificial Sequence
  HTT spacer sequence TTCN PAM
augcacgcacagcagugggg

SEQ ID NO: 38272 - RNA, 20 nt, Artificial Sequence
  HTT spacer sequence TTCN PAM
cucaccugcucuggaagugg

SEQ ID NO: 38273 - RNA, 20 nt, Artificial Sequence
  HTT spacer sequence TTCN PAM
agagcaggugagggaagcca

SEQ ID NO: 38274 - RNA, 20 nt, Artificial Sequence
  HTT spacer sequence TTCN PAM
caaggacaagggccccugau

SEQ ID NO: 38275 - RNA, 20 nt, Artificial Sequence
  HTT spacer sequence TTCN PAM
caagagcauacucaggugga

SEQ ID NO: 38276 - RNA, 20 nt, Artificial Sequence
  HTT spacer sequence TTCN PAM
gaacagccaagccugugcug

SEQ ID NO: 38277 - RNA, 20 nt, Artificial Sequence
  HTT spacer sequence TTCN PAM
gaaugccucaucuggucaaa

SEQ ID NO: 38278 - RNA, 20 nt, Artificial Sequence
  HTT spacer sequence TTCN PAM
uguugauuuuuuuuuuucuu

SEQ ID NO: 38279 - RNA, 20 nt, Artificial Sequence
  HTT spacer sequence TTCN PAM
uuucuuuuugagauggaguu

SEQ ID NO: 38280 - RNA, 20 nt, Artificial Sequence
  HTT spacer sequence TTCN PAM
uuuugagauggaguuuuucc

SEQ ID NO: 38281 - RNA, 20 nt, Artificial Sequence
  HTT spacer sequence TTCN PAM
cuugucacccaggcuggagu

SEQ ID NO: 38282 - RNA, 20 nt, Artificial Sequence
  HTT spacer sequence TTCN PAM
agugauucuccugccucagc

SEQ ID NO: 38283 - RNA, 20 nt, Artificial Sequence
  HTT spacer sequence TTCN PAM
ccugccucagccucccuagu

SEQ ID NO: 38284 - RNA, 20 nt, Artificial Sequence
  HTT spacer sequence TTCN PAM
ccguguuggcugggcugguc

SEQ ID NO: 38285 - RNA, 20 nt, Artificial Sequence
  HTT spacer sequence TTCN PAM
agaccagcccagccaacacg

SEQ ID NO: 38286 - RNA, 20 nt, Artificial Sequence
  HTT spacer sequence TTCN PAM
ggaguucgagaccagcccag

SEQ ID NO: 38287 - RNA, 20 nt, Artificial Sequence
  HTT spacer sequence TTCN PAM
ucaguccccauaugcucacu

SEQ ID NO: 38288 - RNA, 20 nt, Artificial Sequence
  HTT spacer sequence TTCN PAM
guccccauaugcucacugag

SEQ ID NO: 38289 - RNA, 20 nt, Artificial Sequence
  HTT spacer sequence TTCN PAM
aggggcuuguggucuagugg

SEQ ID NO: 38290 - RNA, 20 nt, Artificial Sequence
  HTT spacer sequence TTCN PAM
gcuugaccgcucuccagacg

SEQ ID NO: 38291 - RNA, 20 nt, Artificial Sequence
  HTT spacer sequence TTCN PAM
cucuguggagcagugucuuc

SEQ ID NO: 38292 - RNA, 20 nt, Artificial Sequence
  HTT spacer sequence TTCN PAM
gagcggcugccaugccacug

SEQ ID NO: 38293 - RNA, 20 nt, Artificial Sequence
  HTT spacer sequence TTCN PAM
ucacaggugcuccuggcucu

SEQ ID NO: 38294 - RNA, 20 nt, Artificial Sequence
  HTT spacer sequence TTCN PAM
uagcugcuucccgugugucu

SEQ ID NO: 38295 - RNA, 20 nt, Artificial Sequence
  HTT spacer sequence TTCN PAM
cgugugucucaguuacacac

SEQ ID NO: 38296 - RNA, 20 nt, Artificial Sequence
  HTT spacer sequence TTCN PAM
cgucucaucagugcacacau

SEQ ID NO: 38297 - RNA, 20 nt, Artificial Sequence
  HTT spacer sequence TTCN PAM
gcacugaaagggauacugcu

SEQ ID NO: 38298 - RNA, 20 nt, Artificial Sequence
  HTT spacer sequence TTCN PAM
gugcugaaaagcaaccauca

SEQ ID NO: 38299 - RNA, 20 nt, Artificial Sequence
  HTT spacer sequence TTCN PAM
ggaucugguuagggaagaag

SEQ ID NO: 38300 - RNA, 20 nt, Artificial Sequence
  HTT spacer sequence TTCN PAM
cuaaccagauccugaaacac

SEQ ID NO: 38301 - RNA, 20 nt, Artificial Sequence
  HTT spacer sequence TTCN PAM
ucccuaaccagauccugaaa

SEQ ID NO: 38302 - RNA, 20 nt, Artificial Sequence
  HTT spacer sequence TTCN PAM
uguuaccacacagggcccca

SEQ ID NO: 38303 - RNA, 20 nt, Artificial Sequence
  HTT spacer sequence TTCN PAM
uggcacuguugucaaccagg

SEQ ID NO: 38304 - RNA, 20 nt, Artificial Sequence
  HTT spacer sequence TTCN PAM
aacgcuucguggcacuguug

SEQ ID NO: 38305 - RNA, 20 nt, Artificial Sequence
  HTT spacer sequence TTCN PAM
acaugcaaaugcuccacaaa

SEQ ID NO: 38306 - RNA, 20 nt, Artificial Sequence
  HTT spacer sequence TTCN PAM
cauuauguuuuugcugcuuu

SEQ ID NO: 38307 - RNA, 20 nt, Artificial Sequence
  HTT spacer sequence TTCN PAM
uuuguuaugauuuuuaaaaa

SEQ ID NO: 38308 - RNA, 20 nt, Artificial Sequence
  HTT spacer sequence TTCN PAM
cgcugcgccguuucugcaua

SEQ ID NO: 38309 - RNA, 20 nt, Artificial Sequence
  HTT spacer sequence TTCN PAM
gcauauuccuuuauguagcu

SEQ ID NO: 38310 - RNA, 20 nt, Artificial Sequence
  HTT spacer sequence TTCN PAM
uuuauguagcuuucaaacuc

SEQ ID NO: 38311 - RNA, 20 nt, Artificial Sequence
  HTT spacer sequence TTCN PAM
aacuccucuuaggaguucug

SEQ ID NO: 38312 - RNA, 20 nt, Artificial Sequence
  HTT spacer sequence TTCN PAM
ggucccuacagggcguggga

SEQ ID NO: 38313 - RNA, 20 nt, Artificial Sequence
  HTT spacer sequence TTCN PAM
aacuccucuuaggaguucug

SEQ ID NO: 38314 - RNA, 20 nt, Artificial Sequence
  HTT spacer sequence TTCN PAM
ggucccuacaggguguggga

SEQ ID NO: 38315 - RNA, 20 nt, Artificial Sequence
  HTT spacer sequence TTCN PAM
ucugucuagcucguggaggc

SEQ ID NO: 38316 - RNA, 20 nt, Artificial Sequence
  HTT spacer sequence TTCN PAM
uacuccaguugcuuaggcuc

SEQ ID NO: 38317 - RNA, 20 nt, Artificial Sequence
  HTT spacer sequence TTCN PAM
ccacuuggaaagucccucac

SEQ ID NO: 38318 - RNA, 20 nt, Artificial Sequence
  HTT spacer sequence TTCN PAM
aaguggggaaagucagagcc

SEQ ID NO: 38319 - RNA, 20 nt, Artificial Sequence
  HTT spacer sequence TTCN PAM
caucggcauuuuccccagua

SEQ ID NO: 38320 - RNA, 20 nt, Artificial Sequence
  HTT spacer sequence TTCN PAM
ccaguauuagagccaaggcc

SEQ ID NO: 38321 - RNA, 20 nt, Artificial Sequence
  HTT spacer sequence TTCN PAM
ugauccugggaggagggacg

SEQ ID NO: 38322 - RNA, 20 nt, Artificial Sequence
  HTT spacer sequence TTCN PAM
uugugaagccagaguggugg

SEQ ID NO: 38323 - RNA, 20 nt, Artificial Sequence
  HTT spacer sequence TTCN PAM
caaggaaagccuuuccugau

SEQ ID NO: 38324 - RNA, 20 nt, Artificial Sequence
  HTT spacer sequence TTCN PAM
agacgacuucuucccacccc

SEQ ID NO: 38325 - RNA, 20 nt, Artificial Sequence
  HTT spacer sequence TTCN PAM
ucccaccccaggacaucaug

SEQ ID NO: 38326 - RNA, 20 nt, Artificial Sequence
  HTT spacer sequence TTCN PAM
caccccaggacaucaugaac

SEQ ID NO: 38327 - RNA, 20 nt, Artificial Sequence
  HTT spacer sequence TTCN PAM
ugauguccuggggugggaag

SEQ ID NO: 38328 - RNA, 20 nt, Artificial Sequence
  HTT spacer sequence TTCN PAM
guccaaccagcagccauacc

SEQ ID NO: 38329 - RNA, 20 nt, Artificial Sequence
  HTT spacer sequence TTCN PAM
uggccaccgugguguauaag

SEQ ID NO: 38330 - RNA, 20 nt, Artificial Sequence
  HTT spacer sequence TTCN PAM
cacuccauccccaucccaca

SEQ ID NO: 38331 - RNA, 20 nt, Artificial Sequence
  HTT spacer sequence TTCN PAM
cagcagauucgccagcagag

SEQ ID NO: 38332 - RNA, 20 nt, Artificial Sequence
  HTT spacer sequence TTCN PAM
ccagcagagcccagcuccuc

SEQ ID NO: 38333 - RNA, 20 nt, Artificial Sequence
  HTT spacer sequence TTCN PAM
cguccccccagcccugacac

SEQ ID NO: 38334 - RNA, 20 nt, Artificial Sequence
  HTT spacer sequence TTCN PAM
gacucugcacagcaccgggc

SEQ ID NO: 38335 - RNA, 20 nt, Artificial Sequence
  HTT spacer sequence TTCN PAM
cgcagagggccccggucgcc

SEQ ID NO: 38336 - RNA, 20 nt, Artificial Sequence
  HTT spacer sequence TTCN PAM
uugucagcgcguccaccagc

SEQ ID NO: 38337 - RNA, 20 nt, Artificial Sequence
  HTT spacer sequence TTCN PAM
cuugucaacaccgaggcuca

SEQ ID NO: 38338 - RNA, 20 nt, Artificial Sequence
  HTT spacer sequence TTCN PAM
ugauaagguuuugaaaccua

SEQ ID NO: 38339 - RNA, 20 nt, Artificial Sequence
  HTT spacer sequence TTCN PAM
aaaccuuaucaugaaacaug

SEQ ID NO: 38340 - RNA, 20 nt, Artificial Sequence
  HTT spacer sequence TTCN PAM
cuggggcugagggccuguca

SEQ ID NO: 38341 - RNA, 20 nt, Artificial Sequence
  HTT spacer sequence TTCN PAM
guaccccugucagcauuuua

SEQ ID NO: 38342 - RNA, 20 nt, Artificial Sequence
  HTT spacer sequence TTCN PAM
guggagggccugggugaggg

SEQ ID NO: 38343 - RNA, 20 nt, Artificial Sequence
  HTT spacer sequence TTCN PAM
ccugacacugcuucucauua

SEQ ID NO: 38344 - RNA, 20 nt, Artificial Sequence
  HTT spacer sequence TTCN PAM
cauuagcuuuggucauugug

SEQ ID NO: 38345 - RNA, 20 nt, Artificial Sequence
  HTT spacer sequence TTCN PAM
ccgagagggcgaucgaggca

SEQ ID NO: 38346 - RNA, 20 nt, Artificial Sequence
  HTT spacer sequence TTCN PAM
cacccccagaugcuggcugc

SEQ ID NO: 38347 - RNA, 20 nt, Artificial Sequence
  HTT spacer sequence TTCN PAM
cuuuccacagcccuucccca

SEQ ID NO: 38348 - RNA, 20 nt, Artificial Sequence
  HTT spacer sequence TTCN PAM
acagcccuuccccaagacag

SEQ ID NO: 38349 - RNA, 20 nt, Artificial Sequence
  HTT spacer sequence TTCN PAM
ccaagacagaccacaagagc

SEQ ID NO: 38350 - RNA, 20 nt, Artificial Sequence
  HTT spacer sequence TTCN PAM
gcuggccuccacuagcccug

SEQ ID NO: 38351 - RNA, 20 nt, Artificial Sequence
  HTT spacer sequence TTCN PAM
ugcaacccuuggcuggcugg

SEQ ID NO: 38352 - RNA, 20 nt, Artificial Sequence
  HTT spacer sequence TTCN PAM
ggggcucugcucgcucucca

SEQ ID NO: 38353 - RNA, 20 nt, Artificial Sequence
  HTT spacer sequence TTCN PAM
ggagaggaacucccagguga

SEQ ID NO: 38354 - RNA, 20 nt, Artificial Sequence
  HTT spacer sequence TTCN PAM
ucuccugaaacagucuacaa

SEQ ID NO: 38355 - RNA, 20 nt, Artificial Sequence
  HTT spacer sequence TTCN PAM
ccucauuugccggccuuuuu

SEQ ID NO: 38356 - RNA, 20 nt, Artificial Sequence
  HTT spacer sequence TTCN PAM
uuaacuccugcaccagccuc

SEQ ID NO: 38357 - RNA, 20 nt, Artificial Sequence
  HTT spacer sequence TTCN PAM
cguccaccugcuccagcuug

SEQ ID NO: 38358 - RNA, 20 nt, Artificial Sequence
  HTT spacer sequence TTCN PAM
gccuggucgccacagacuuc

SEQ ID NO: 38359 - RNA, 20 nt, Artificial Sequence
  HTT spacer sequence TTCN PAM
acagacaccagauagaggag

SEQ ID NO: 38360 - RNA, 20 nt, Artificial Sequence
  HTT spacer sequence TTCN PAM
agucugugcuugaggugguu

SEQ ID NO: 38361 - RNA, 20 nt, Artificial Sequence
  HTT spacer sequence TTCN PAM
uggggcugcaaccaccucaa

SEQ ID NO: 38362 - RNA, 20 nt, Artificial Sequence
  HTT spacer sequence TTCN PAM
uaaacaagucagcagccggu

SEQ ID NO: 38363 - RNA, 20 nt, Artificial Sequence
  HTT spacer sequence TTCN PAM
aaaggcuccggccccagcug

SEQ ID NO: 38364 - RNA, 20 nt, Artificial Sequence
  HTT spacer sequence TTCN PAM
gcacaugccgcgggcggcca

SEQ ID NO: 38365 - RNA, 20 nt, Artificial Sequence
  HTT spacer sequence TTCN PAM
gccacauggcagagacacgc

SEQ ID NO: 38366 - RNA, 20 nt, Artificial Sequence
  HTT spacer sequence TTCN PAM
agaaagcaggagcagcugug

SEQ ID NO: 38367 - RNA, 20 nt, Artificial Sequence
  HTT spacer sequence TTCN PAM
ggaaggccucaggcucagcc

SEQ ID NO: 38368 - RNA, 20 nt, Artificial Sequence
  HTT spacer sequence TTCN PAM
ccugauagucaccugcuggu

SEQ ID NO: 38369 - RNA, 20 nt, Artificial Sequence
  HTT spacer sequence TTCN PAM
ggcccagaugcaagagcagc

SEQ ID NO: 38370 - RNA, 20 nt, Artificial Sequence
  HTT spacer sequence TTCN PAM
acugcaggacagcagagggg

SEQ ID NO: 38371 - RNA, 20 nt, Artificial Sequence
  HTT spacer sequence TTCN PAM
caaagccugcucacggcacc

SEQ ID NO: 38372 - RNA, 20 nt, Artificial Sequence
  HTT spacer sequence TTCN PAM
cccuucucucuuuucuucuc

SEQ ID NO: 38373 - RNA, 20 nt, Artificial Sequence
  HTT spacer sequence TTCN PAM
cucuuuucuucucaggauuu

SEQ ID NO: 38374 - RNA, 20 nt, Artificial Sequence
  HTT spacer sequence TTCN PAM
ucucaggauuuaaaauuuaa

SEQ ID NO: 38375 - RNA, 20 nt, Artificial Sequence
  HTT spacer sequence TTCN PAM
caggauuuaaaauuuaauua

SEQ ID NO: 38376 - RNA, 20 nt, Artificial Sequence
  HTT spacer sequence TTCN PAM
augcccguguaaaguaugug

SEQ ID NO: 38377 - RNA, 20 nt, Artificial Sequence
  HTT spacer sequence TTCN PAM
cauacuuuacacgggcauag

SEQ ID NO: 38378 - RNA, 20 nt, Artificial Sequence
  HTT spacer sequence TTCN PAM
guuguacauguuccuguuua

SEQ ID NO: 38379 - RNA, 20 nt, Artificial Sequence
  HTT spacer sequence TTCN PAM
uguuuaugcauucacaaggu

SEQ ID NO: 38380 - RNA, 20 nt, Artificial Sequence
  HTT spacer sequence TTCN PAM
caaggugacugggauguaga

SEQ ID NO: 38381 - RNA, 20 nt, Artificial Sequence
  HTT spacer sequence TTCN PAM
ccacccaccagucagggaca

SEQ ID NO: 38382 - RNA, 20 nt, Artificial Sequence
  HTT spacer sequence TTCN PAM
cagcugagugacagggaggc

SEQ ID NO: 38383 - RNA, 20 nt, Artificial Sequence
  HTT spacer sequence TTCN PAM
uugcuagcccugggguggcg

SEQ ID NO: 38384 - RNA, 20 nt, Artificial Sequence
  HTT spacer sequence TTCN PAM
gcccccguuccagcugacau

SEQ ID NO: 38385 - RNA, 20 nt, Artificial Sequence
  HTT spacer sequence TTCN PAM
agcugacaucuugcacggug

SEQ ID NO: 38386 - RNA, 20 nt, Artificial Sequence
  HTT spacer sequence TTCN PAM
auuuuaaugacuuggcuccu

SEQ ID NO: 38387 - RNA, 20 nt, Artificial Sequence
  HTT spacer sequence TTCN PAM
ggauggccgggcugcugcug

SEQ ID NO: 38388 - RNA, 20 nt, Artificial Sequence
  HTT spacer sequence TTCN PAM
ucagcccuagaggcgagcca

SEQ ID NO: 38389 - RNA, 20 nt, Artificial Sequence
  HTT spacer sequence TTCN PAM
auacccaaaacaucgacggg

SEQ ID NO: 38390 - RNA, 20 nt, Artificial Sequence
  HTT spacer sequence TTCN PAM
uccacuuaccacauucaaua

SEQ ID NO: 38391 - RNA, 20 nt, Artificial Sequence
  HTT spacer sequence TTCN PAM
aacauuuccuccacuuacca

SEQ ID NO: 38392 - RNA, 20 nt, Artificial Sequence
  HTT spacer sequence TTCN PAM
accugucccucuccuaugug

SEQ ID NO: 38393 - RNA, 20 nt, Artificial Sequence
  HTT spacer sequence TTCN PAM
gcucccccucacguaugugg

SEQ ID NO: 38394 - RNA, 20 nt, Artificial Sequence
  HTT spacer sequence TTCN PAM
caccagcucccaacagaggc

SEQ ID NO: 38395 - RNA, 20 nt, Artificial Sequence
  HTT spacer sequence TTCN PAM
accgcuccugcugccccgcc

SEQ ID NO: 38396 - RNA, 20 nt, Artificial Sequence
  HTT spacer sequence TTCN PAM
cuuaagggccuccucaaaca

SEQ ID NO: 38397 - RNA, 20 nt, Artificial Sequence
  HTT spacer sequence TTCN PAM
guagcuucccuuaagggccu

SEQ ID NO: 38398 - RNA, 20 nt, Artificial Sequence
  HTT spacer sequence TTCN PAM
uacguguuauaauucaguag

SEQ ID NO: 38399 - RNA, 20 nt, Artificial Sequence
  HTT spacer sequence TTCN PAM
guauugguugggggcuccug

SEQ ID NO: 38400 - RNA, 20 nt, Artificial Sequence
  HTT spacer sequence TTCN PAM
cauccuagcuuuuuccugga

SEQ ID NO: 38401 - RNA, 20 nt, Artificial Sequence
  HTT spacer sequence TTCN PAM
uggaaagcccgcuagaaggu

SEQ ID NO: 38402 - RNA, 20 nt, Artificial Sequence
  HTT spacer sequence TTCN PAM
aggaaaaagcuaggaugaga

SEQ ID NO: 38403 - RNA, 20 nt, Artificial Sequence
  HTT spacer sequence TTCN PAM
agcgggcuuuccaggaaaaa

SEQ ID NO: 38404 - RNA, 20 nt, Artificial Sequence
  HTT spacer sequence TTCN PAM
caaaccuucuagcgggcuuu

SEQ ID NO: 38405 - RNA, 20 nt, Artificial Sequence
  HTT spacer sequence TTCN PAM
ccucguucccaaaccuucua

SEQ ID NO: 38406 - RNA, 20 nt, Artificial Sequence
  HTT spacer sequence TTCN PAM
cagaacuguuggcugcuccc

SEQ ID NO: 38407 - RNA, 20 nt, Artificial Sequence
  HTT spacer sequence TTCN PAM
gagaacuuuccccucguucc

SEQ ID NO: 38408 - RNA, 20 nt, Artificial Sequence
  HTT spacer sequence TTCN PAM
uggcuagauguuuacauuug

SEQ ID NO: 38409 - RNA, 20 nt, Artificial Sequence
  HTT spacer sequence TTCN PAM
uacaaauguaaacaucuagc

SEQ ID NO: 38410 - RNA, 20 nt, Artificial Sequence
  HTT spacer sequence TTCN PAM
caguguuauuucuuacaaau

SEQ ID NO: 38411 - RNA, 20 nt, Artificial Sequence
  HTT spacer sequence TTCN PAM
cuuggaaugcauaucgcugg

SEQ ID NO: 38412 - RNA, 20 nt, Artificial Sequence
  HTT spacer sequence TTCN PAM
aagggaauggcucuguuuua

SEQ ID NO: 38413 - RNA, 20 nt, Artificial Sequence
  HTT spacer sequence TTCN PAM
ucuuguuuacgacgugaucu

SEQ ID NO: 38414 - RNA, 20 nt, Artificial Sequence
  HTT spacer sequence TTCN PAM
gagccccuugcuaaggacug

SEQ ID NO: 38415 - RNA, 20 nt, Artificial Sequence
  HTT spacer sequence TTCN PAM
ucuccggagcacacaggcag

SEQ ID NO: 38416 - RNA, 20 nt, Artificial Sequence
  HTT spacer sequence TTCN PAM
cccacgcauauacauaaagu

SEQ ID NO: 38417 - RNA, 20 nt, Artificial Sequence
  HTT spacer sequence TTCN PAM
uccuggaaguugacuuuccu

SEQ ID NO: 38418 - RNA, 20 nt, Artificial Sequence
  HTT spacer sequence TTCN PAM
uggaaguugacuuuccuuag

SEQ ID NO: 38419 - RNA, 20 nt, Artificial Sequence
  HTT spacer sequence TTCN PAM
aggaagaaccgacacgggca

SEQ ID NO: 38420 - RNA, 20 nt, Artificial Sequence
  HTT spacer sequence TTCN PAM
uuagacccgccaggucaagu

SEQ ID NO: 38421 - RNA, 20 nt, Artificial Sequence
  HTT spacer sequence TTCN PAM
uugcccacuaggaucccacu

SEQ ID NO: 38422 - RNA, 20 nt, Artificial Sequence
  HTT spacer sequence TTCN PAM
ccagugggauccuagugggc

SEQ ID NO: 38423 - RNA, 20 nt, Artificial Sequence
  HTT spacer sequence TTCN PAM
gcagagagcugauauggaga

SEQ ID NO: 38424 - RNA, 20 nt, Artificial Sequence
  HTT spacer sequence TTCN PAM
ucccuucugcagagagcuga

SEQ ID NO: 38425 - RNA, 20 nt, Artificial Sequence
  HTT spacer sequence TTCN PAM
uaaaaaucuguggcaagcac

SEQ ID NO: 38426 - RNA, 20 nt, Artificial Sequence
  HTT spacer sequence TTCN PAM
ugcugguaauaucgggaaag

SEQ ID NO: 38427 - RNA, 20 nt, Artificial Sequence
  HTT spacer sequence TTCN PAM
cgauauuaccagcaggaaaa

SEQ ID NO: 38428 - RNA, 20 nt, Artificial Sequence
  HTT spacer sequence TTCN PAM
uuaaaaucuuucccgauauu

SEQ ID NO: 38429 - RNA, 20 nt, Artificial Sequence
  HTT spacer sequence TTCN PAM
acccugguuucauuaaaauc

SEQ ID NO: 38430 - RNA, 20 nt, Artificial Sequence
  HTT spacer sequence TTCN PAM
gugcauugccaaacaauucu

SEQ ID NO: 38431 - RNA, 20 nt, Artificial Sequence
  HTT spacer sequence TTCN PAM
uucccaaaaugugccucccu

SEQ ID NO: 38432 - RNA, 20 nt, Artificial Sequence
  HTT spacer sequence TTCN PAM
caaaaugugccucccuuccg

SEQ ID NO: 38433 - RNA, 20 nt, Artificial Sequence
  HTT spacer sequence TTCN PAM
gcugcgggcccagcugaguc

SEQ ID NO: 38434 - RNA, 20 nt, Artificial Sequence
  HTT spacer sequence TTCN PAM
agcugccaagugcucuuugu

SEQ ID NO: 38435 - RNA, 20 nt, Artificial Sequence
  HTT spacer sequence TTCN PAM
gccagcgcauguguccuuuc

SEQ ID NO: 38436 - RNA, 20 nt, Artificial Sequence
  HTT spacer sequence TTCN PAM
aggggaaaaugugaagcuga

SEQ ID NO: 38437 - RNA, 20 nt, Artificial Sequence
  HTT spacer sequence TTCN PAM
ccuugaaaggacacaugcgc

SEQ ID NO: 38438 - RNA, 20 nt, Artificial Sequence
  HTT spacer sequence TTCN PAM
cauuuuccccuugaaaggac

SEQ ID NO: 38439 - RNA, 20 nt, Artificial Sequence
  HTT spacer sequence TTCN PAM
gcuucacauuuuccccuuga

SEQ ID NO: 38440 - RNA, 20 nt, Artificial Sequence
  HTT spacer sequence TTCN PAM
gggugucuggaggggguuca

SEQ ID NO: 38441 - RNA, 20 nt, Artificial Sequence
  HTT spacer sequence TTCN PAM
cagaugcuacauucugggug

SEQ ID NO: 38442 - RNA, 20 nt, Artificial Sequence
  HTT spacer sequence TTCN PAM
uggagggggucauuucagag

SEQ ID NO: 38443 - RNA, 20 nt, Artificial Sequence
  HTT spacer sequence TTCN PAM
gagcccucggagccaaugaa

SEQ ID NO: 38444 - RNA, 20 nt, Artificial Sequence
  HTT spacer sequence TTCN PAM
uuggcuccgagggcucugaa

SEQ ID NO: 38445 - RNA, 20 nt, Artificial Sequence
  HTT spacer sequence TTCN PAM
accugccaggcggccacaca

SEQ ID NO: 38446 - RNA, 20 nt, Artificial Sequence
  HTT spacer sequence TTCN PAM
ucccguugcgggguggagug

SEQ ID NO: 38447 - RNA, 20 nt, Artificial Sequence
  HTT spacer sequence TTCN PAM
gugugucugguggguggagu

SEQ ID NO: 38448 - RNA, 20 nt, Artificial Sequence
  HTT spacer sequence TTCN PAM
cuugcuaccugugagcaucc

SEQ ID NO: 38449 - RNA, 20 nt, Artificial Sequence
  HTT spacer sequence TTCN PAM
cagcagacauccucaucggg

SEQ ID NO: 38450 - RNA, 20 nt, Artificial Sequence
  HTT spacer sequence TTCN PAM
ucccucugcggggaggaccc

SEQ ID NO: 38451 - RNA, 20 nt, Artificial Sequence
  HTT spacer sequence TTCN PAM
cacuccuacacgugaccccu

SEQ ID NO: 38452 - RNA, 20 nt, Artificial Sequence
  HTT spacer sequence TTCN PAM
ucucacuccuacacgugacc

SEQ ID NO: 38453 - RNA, 20 nt, Artificial Sequence
  HTT spacer sequence TTCN PAM
uucuucucacuccuacacgu

SEQ ID NO: 38454 - RNA, 20 nt, Artificial Sequence
  HTT spacer sequence TTCN PAM
caggaggcccaggcccggca

SEQ ID NO: 38455 - RNA, 20 nt, Artificial Sequence
  HTT spacer sequence TTCN PAM
gagcagcucccuccuuccca

SEQ ID NO: 38456 - RNA, 20 nt, Artificial Sequence
  HTT spacer sequence TTCN PAM
guugucaugcggcauucuga

SEQ ID NO: 38457 - RNA, 20 nt, Artificial Sequence
  HTT spacer sequence TTCN PAM
agguugccuucaguugucau

SEQ ID NO: 38458 - RNA, 20 nt, Artificial Sequence
  HTT spacer sequence TTCN PAM
ggggccgcucuucccccaug

SEQ ID NO: 38459 - RNA, 20 nt, Artificial Sequence
  HTT spacer sequence TTCN PAM
cccaugugccugucacgcuc

SEQ ID NO: 38460 - RNA, 20 nt, Artificial Sequence
  HTT spacer sequence TTCN PAM
uuugacugcaccagagcgug

SEQ ID NO: 38461 - RNA, 20 nt, Artificial Sequence
  HTT spacer sequence TTCN PAM
ccucaguuguuucuaagagc

SEQ ID NO: 38462 - RNA, 20 nt, Artificial Sequence
  HTT spacer sequence TTCN PAM
aagagcagagucucccgcug

SEQ ID NO: 38463 - RNA, 20 nt, Artificial Sequence
  HTT spacer sequence TTCN PAM
ggucuggguggggcuccggg

SEQ ID NO: 38464 - RNA, 20 nt, Artificial Sequence
  HTT spacer sequence TTCN PAM
gagagcaaagggaaggacug

SEQ ID NO: 38465 - RNA, 20 nt, Artificial Sequence
  HTT spacer sequence TTCN PAM
cuuugcucucagaagcauuc

SEQ ID NO: 38466 - RNA, 20 nt, Artificial Sequence
  HTT spacer sequence TTCN PAM
uuuaauuuggauguacaaug

SEQ ID NO: 38467 - RNA, 20 nt, Artificial Sequence
  HTT spacer sequence TTCN PAM
auuuuuuuccuuuaauuugg

SEQ ID NO: 38468 - RNA, 20 nt, Artificial Sequence
  HTT spacer sequence TTCN PAM
ugagaaccuagaccuugcug

SEQ ID NO: 38469 - RNA, 20 nt, Artificial Sequence
  HTT spacer sequence TTCN PAM
caugaagcaaagcaagccuc

SEQ ID NO: 38470 - RNA, 20 nt, Artificial Sequence
  HTT spacer sequence TTCN PAM
uaagacuccagcucagcaag

SEQ ID NO: 38471 - RNA, 20 nt, Artificial Sequence
  HTT spacer sequence TTCN PAM
ccagcaggggcagaaacugu

SEQ ID NO: 38472 - RNA, 20 nt, Artificial Sequence
  HTT spacer sequence TTCN PAM
gccccugcuggagaagcacu

SEQ ID NO: 38473 - RNA, 20 nt, Artificial Sequence
  HTT spacer sequence TTCN PAM
guagccagggaugaggaagu

SEQ ID NO: 38474 - RNA, 20 nt, Artificial Sequence
  HTT spacer sequence TTCN PAM
ucaucccuggcuacagaaaa

SEQ ID NO: 38475 - RNA, 20 nt, Artificial Sequence
  HTT spacer sequence TTCN PAM
gcaagggccuucccaaacca

SEQ ID NO: 38476 - RNA, 20 nt, Artificial Sequence
  HTT spacer sequence TTCN PAM
caaaccacaguacagguggu

SEQ ID NO: 38477 - RNA, 20 nt, Artificial Sequence
  HTT spacer sequence TTCN PAM
ugcccugcagaugggagcug

SEQ ID NO: 38478 - RNA, 20 nt, Artificial Sequence
  HTT spacer sequence TTCN PAM
uggucaagugacaucauaag

SEQ ID NO: 38479 - RNA, 20 nt, Artificial Sequence
  HTT spacer sequence TTCN PAM
gugccaugggccaaguccug

SEQ ID NO: 38480 - RNA, 20 nt, Artificial Sequence
  HTT spacer sequence TTCN PAM
cacagggcccaccacccuuc

SEQ ID NO: 38481 - RNA, 20 nt, Artificial Sequence
  HTT spacer sequence TTCN PAM
accuccuuggccauugacac

SEQ ID NO: 38482 - RNA, 20 nt, Artificial Sequence
  HTT spacer sequence TTCN PAM
agcuuguuuguccugucuga

SEQ ID NO: 38483 - RNA, 20 nt, Artificial Sequence
  HTT spacer sequence TTCN PAM
gacaggacaaacaagcuaga

SEQ ID NO: 38484 - RNA, 20 nt, Artificial Sequence
  HTT spacer sequence TTCN PAM
uggaguaggcgcugguucag

SEQ ID NO: 38485 - RNA, 20 nt, Artificial Sequence
  HTT spacer sequence TTCN PAM
aagcuccggacgagccucuc

SEQ ID NO: 38486 - RNA, 20 nt, Artificial Sequence
  HTT spacer sequence TTCN PAM
gagaggcucguccggagcuu

SEQ ID NO: 38487 - RNA, 20 nt, Artificial Sequence
  HTT spacer sequence TTCN PAM
ugcagguugguaagacaucu

SEQ ID NO: 38488 - RNA, 20 nt, Artificial Sequence
  HTT spacer sequence TTCN PAM
ucuggugcaggguauuuagu

SEQ ID NO: 38489 - RNA, 20 nt, Artificial Sequence
  HTT spacer sequence TTCN PAM
ggcuaauuggcaggggucgu

SEQ ID NO: 38490 - RNA, 20 nt, Artificial Sequence
  HTT spacer sequence TTCN PAM
uucccugcucugcugucugu

SEQ ID NO: 38491 - RNA, 20 nt, Artificial Sequence
  HTT spacer sequence TTCN PAM
cugcucugcugucugugcca

SEQ ID NO: 38492 - RNA, 20 nt, Artificial Sequence
  HTT spacer sequence TTCN PAM
cugagcagggauagggauca

SEQ ID NO: 38493 - RNA, 20 nt, Artificial Sequence
  HTT spacer sequence TTCN PAM
gagcuaccuaaauucugguc

SEQ ID NO: 38494 - RNA, 20 nt, Artificial Sequence
  HTT spacer sequence TTCN PAM
ggucacuucagagaaaugga

SEQ ID NO: 38495 - RNA, 20 nt, Artificial Sequence
  HTT spacer sequence TTCN PAM
gagaaauggagcacccccuu

SEQ ID NO: 38496 - RNA, 20 nt, Artificial Sequence
  HTT spacer sequence TTCN PAM
cugaagugaccagaauuuag

SEQ ID NO: 38497 - RNA, 20 nt, Artificial Sequence
  HTT spacer sequence TTCN PAM
cccugguccagguguggaca

SEQ ID NO: 38498 - RNA, 20 nt, Artificial Sequence
  HTT spacer sequence TTCN PAM
gaaagaagaggggccggggu

SEQ ID NO: 38499 - RNA, 20 nt, Artificial Sequence
  HTT spacer sequence TTCN PAM
gaaauuaccagccaugccag

SEQ ID NO: 38500 - RNA, 20 nt, Artificial Sequence
  HTT spacer sequence TTCN PAM
uucugaaauuaccagccaug

SEQ ID NO: 38501 - RNA, 20 nt, Artificial Sequence
  HTT spacer sequence TTCN PAM
cacuggaccccggccccucu

SEQ ID NO: 38502 - RNA, 20 nt, Artificial Sequence
  HTT spacer sequence TTCN PAM
ccgcugcuucccacuggacc

SEQ ID NO: 38503 - RNA, 20 nt, Artificial Sequence
  HTT spacer sequence TTCN PAM
ucuuccucaucggagagcac

SEQ ID NO: 38504 - RNA, 20 nt, Artificial Sequence
  HTT spacer sequence TTCN PAM
ucaucggagagcacacccug

SEQ ID NO: 38505 - RNA, 20 nt, Artificial Sequence
  HTT spacer sequence TTCN PAM
gugguauuugauuuuggcug

SEQ ID NO: 38506 - RNA, 20 nt, Artificial Sequence
  HTT spacer sequence TTCN PAM
agaucccaacaaagccagua

SEQ ID NO: 38507 - RNA, 20 nt, Artificial Sequence
  HTT spacer sequence TTCN PAM
ccugcguggugcguggagca

SEQ ID NO: 38508 - RNA, 20 nt, Artificial Sequence
  HTT spacer sequence TTCN PAM
cucaucugacuuacagugcu

SEQ ID NO: 38509 - RNA, 20 nt, Artificial Sequence
  HTT spacer sequence TTCN PAM
guggcggcuccacccgguac

SEQ ID NO: 38510 - RNA, 20 nt, Artificial Sequence
  HTT spacer sequence TTCN PAM
ucuguccucgguuggcugug

SEQ ID NO: 38511 - RNA, 20 nt, Artificial Sequence
  HTT spacer sequence TTCN PAM
uggggguguggggugcaccc

SEQ ID NO: 38512 - RNA, 20 nt, Artificial Sequence
  HTT spacer sequence TTCN PAM
cugaggggugcaccccacac

SEQ ID NO: 38513 - RNA, 20 nt, Artificial Sequence
  HTT spacer sequence TTCN PAM
ucaggccccacugcaggcuu

SEQ ID NO: 38514 - RNA, 20 nt, Artificial Sequence
  HTT spacer sequence TTCN PAM
caaaagagguccuggugaug

SEQ ID NO: 38515 - RNA, 20 nt, Artificial Sequence
  HTT spacer sequence TTCN PAM
ccacccuacaccaggccucc

SEQ ID NO: 38516 - RNA, 20 nt, Artificial Sequence
  HTT spacer sequence TTCN PAM
gcccucugccuccagugaug

SEQ ID NO: 38517 - RNA, 20 nt, Artificial Sequence
  HTT spacer sequence TTCN PAM
ccuugugugcacaggccccu

SEQ ID NO: 38518 - RNA, 20 nt, Artificial Sequence
  HTT spacer sequence TTCN PAM
acccugccccagcggcggca

SEQ ID NO: 38519 - RNA, 20 nt, Artificial Sequence
  HTT spacer sequence TTCN PAM
ccuccuggccccaauugcuc

SEQ ID NO: 38520 - RNA, 20 nt, Artificial Sequence
  HTT spacer sequence TTCN PAM
ccagagcaauuggggccagg

SEQ ID NO: 38521 - RNA, 20 nt, Artificial Sequence
  HTT spacer sequence TTCN PAM
cugccuucacccaagcccug

SEQ ID NO: 38522 - RNA, 20 nt, Artificial Sequence
  HTT spacer sequence TTCN PAM
cccaagcccugaacuccuca

SEQ ID NO: 38523 - RNA, 20 nt, Artificial Sequence
  HTT spacer sequence TTCN PAM
gggcuugggugaaggcagag

SEQ ID NO: 38524 - RNA, 20 nt, Artificial Sequence
  HTT spacer sequence TTCN PAM
aggagcagcaguggugagca

SEQ ID NO: 38525 - RNA, 20 nt, Artificial Sequence
  HTT spacer sequence TTCN PAM
guguuugggagcccugcugc

SEQ ID NO: 38526 - RNA, 20 nt, Artificial Sequence
  HTT spacer sequence TTCN PAM
gcccugccugacaggccagc

SEQ ID NO: 38527 - RNA, 20 nt, Artificial Sequence
  HTT spacer sequence TTCN PAM
ggguggauuuucugcccugc

SEQ ID NO: 38528 - RNA, 20 nt, Artificial Sequence
  HTT spacer sequence TTCN PAM
aaauaaugaggcugggccca

SEQ ID NO: 38529 - RNA, 20 nt, Artificial Sequence
  HTT spacer sequence TTCN PAM
agccugagcccagcagggcc

SEQ ID NO: 38530 - RNA, 20 nt, Artificial Sequence
  HTT spacer sequence TTCN PAM
cccucaggugcugcugguug

SEQ ID NO: 38531 - RNA, 20 nt, Artificial Sequence
  HTT spacer sequence TTCN PAM
uguccucacauuggagguca

SEQ ID NO: 38532 - RNA, 20 nt, Artificial Sequence
  HTT spacer sequence TTCN PAM
cgaggcagagcccucacacu

SEQ ID NO: 38533 - RNA, 20 nt, Artificial Sequence
  HTT spacer sequence TTCN PAM
caggcucagugcacauggga

SEQ ID NO: 38534 - RNA, 20 nt, Artificial Sequence
  HTT spacer sequence TTCN PAM
caggguaaaaggcucaacuc

SEQ ID NO: 38535 - RNA, 20 nt, Artificial Sequence
  HTT spacer sequence TTCN PAM
agugggcgcagggaggcagg

SEQ ID NO: 38536 - RNA, 20 nt, Artificial Sequence
  HTT spacer sequence TTCN PAM
gccaggacaguaggccugac

SEQ ID NO: 38537 - RNA, 20 nt, Artificial Sequence
  HTT spacer sequence TTCN PAM
acaaauccaccuuggagcug

SEQ ID NO: 38538 - RNA, 20 nt, Artificial Sequence
  HTT spacer sequence TTCN PAM
gggagggcugugcccccuua

SEQ ID NO: 38539 - RNA, 20 nt, Artificial Sequence
  HTT spacer sequence TTCN PAM
ucaccuccacaacaggggua

SEQ ID NO: 38540 - RNA, 20 nt, Artificial Sequence
  HTT spacer sequence TTCN PAM
gggugcagcucuagcgacuc

SEQ ID NO: 38541 - RNA, 20 nt, Artificial Sequence
  HTT spacer sequence TTCN PAM
gcuuaccccuugugccggga

SEQ ID NO: 38542 - RNA, 20 nt, Artificial Sequence
  HTT spacer sequence TTCN PAM
guagccaugacuccaagggc

SEQ ID NO: 38543 - RNA, 20 nt, Artificial Sequence
  HTT spacer sequence TTCN PAM
gaccggucccugaccucacc

SEQ ID NO: 38544 - RNA, 20 nt, Artificial Sequence
  HTT spacer sequence TTCN PAM
gcccuccccggugaggucag

SEQ ID NO: 38545 - RNA, 20 nt, Artificial Sequence
  HTT spacer sequence TTCN PAM
ugaggagccagggcuuccua

SEQ ID NO: 38546 - RNA, 20 nt, Artificial Sequence
  HTT spacer sequence TTCN PAM
uagaggagguaggccuucua

SEQ ID NO: 38547 - RNA, 20 nt, Artificial Sequence
  HTT spacer sequence TTCN PAM
agucacuccuucaucugcag

SEQ ID NO: 38548 - RNA, 20 nt, Artificial Sequence
  HTT spacer sequence TTCN PAM
ucugcaggcacuccacagag

SEQ ID NO: 38549 - RNA, 20 nt, Artificial Sequence
  HTT spacer sequence TTCN PAM
aucugggccucaggagacau

SEQ ID NO: 38550 - RNA, 20 nt, Artificial Sequence
  HTT spacer sequence TTCN PAM
ucacacaucccuggggcccu

SEQ ID NO: 38551 - RNA, 20 nt, Artificial Sequence
  HTT spacer sequence TTCN PAM
uauccugacugcgggcaaga

SEQ ID NO: 38552 - RNA, 20 nt, Artificial Sequence
  HTT spacer sequence TTCN PAM
ccuucccuaugcugggcacc

SEQ ID NO: 38553 - RNA, 20 nt, Artificial Sequence
  HTT spacer sequence TTCN PAM
cuaugcugggcacccacagu

SEQ ID NO: 38554 - RNA, 20 nt, Artificial Sequence
  HTT spacer sequence TTCN PAM
ccugagagccucggucccac

SEQ ID NO: 38555 - RNA, 20 nt, Artificial Sequence
  HTT spacer sequence TTCN PAM
aggcucagcugcccuucuug

SEQ ID NO: 38556 - RNA, 20 nt, Artificial Sequence
  HTT spacer sequence TTCN PAM
uggggcagcccacaccugag

SEQ ID NO: 38557 - RNA, 20 nt, Artificial Sequence
  HTT spacer sequence TTCN PAM
ggugccgaugcccuugggcg

SEQ ID NO: 38558 - RNA, 20 nt, Artificial Sequence
  HTT spacer sequence TTCN PAM
ccgggcagaacccccaggcc

SEQ ID NO: 38559 - RNA, 20 nt, Artificial Sequence
  HTT spacer sequence TTCN PAM
gcccggagaagugccgccca

SEQ ID NO: 38560 - RNA, 20 nt, Artificial Sequence
  HTT spacer sequence TTCN PAM
gguuccgcugcaucuggggc

SEQ ID NO: 38561 - RNA, 20 nt, Artificial Sequence
  HTT spacer sequence TTCN PAM
gcugcaucuggggcucucgg

SEQ ID NO: 38562 - RNA, 20 nt, Artificial Sequence
  HTT spacer sequence TTCN PAM
gcacagcgugcggagacggg

SEQ ID NO: 38563 - RNA, 20 nt, Artificial Sequence
  HTT spacer sequence TTCN PAM
caggagugcccuguggccuc

SEQ ID NO: 38564 - RNA, 20 nt, Artificial Sequence
  HTT spacer sequence TTCN PAM
cuccugugucucaaacagag

SEQ ID NO: 38565 - RNA, 20 nt, Artificial Sequence
  HTT spacer sequence TTCN PAM
aguguccacagaccuaaggc

SEQ ID NO: 38566 - RNA, 20 nt, Artificial Sequence
  HTT spacer sequence TTCN PAM
cuugcuccagcccccaggcg

SEQ ID NO: 38567 - RNA, 20 nt, Artificial Sequence
  HTT spacer sequence TTCN PAM
ugugagggcccagccccagg

SEQ ID NO: 38568 - RNA, 20 nt, Artificial Sequence
  HTT spacer sequence TTCN PAM
gaaggcaggggccuucugag

SEQ ID NO: 38569 - RNA, 20 nt, Artificial Sequence
  HTT spacer sequence TTCN PAM
gaacuggggcugggcccugg

SEQ ID NO: 38570 - RNA, 20 nt, Artificial Sequence
  HTT spacer sequence TTCN PAM
gagggagcuuaaggguccca

SEQ ID NO: 38571 - RNA, 20 nt, Artificial Sequence
  HTT spacer sequence TTCN PAM
cccaccuuuugcccccuuuc

SEQ ID NO: 38572 - RNA, 20 nt, Artificial Sequence
  HTT spacer sequence TTCN PAM
ccuugccuguucccacccga

SEQ ID NO: 38573 - RNA, 20 nt, Artificial Sequence
  HTT spacer sequence TTCN PAM
cacccgaggcccccucuugg

SEQ ID NO: 38574 - RNA, 20 nt, Artificial Sequence
  HTT spacer sequence TTCN PAM
gugccgccccggcucacgca

SEQ ID NO: 38575 - RNA, 20 nt, Artificial Sequence
  HTT spacer sequence TTCN PAM
ugugcuuucaguuaaaaggu

SEQ ID NO: 38576 - RNA, 20 nt, Artificial Sequence
  HTT spacer sequence TTCN PAM
guuaaaagguuucuguuguu

SEQ ID NO: 38577 - RNA, 20 nt, Artificial Sequence
  HTT spacer sequence TTCN PAM
guuguuguagcuuaugcagu

SEQ ID NO: 38578 - RNA, 20 nt, Artificial Sequence
  HTT spacer sequence TTCN PAM
auagcaacagagcaacugca

SEQ ID NO: 38579 - RNA, 20 nt, Artificial Sequence
  HTT spacer sequence TTCN PAM
cguuuaaaagcuuuuaacua

SEQ ID NO: 38580 - RNA, 20 nt, Artificial Sequence
  HTT spacer sequence TTCN PAM
ugccugucagauguaggccc

SEQ ID NO: 38581 - RNA, 20 nt, Artificial Sequence
  HTT spacer sequence TTCN PAM
agcgagcgugagcggcgccu

SEQ ID NO: 38582 - RNA, 20 nt, Artificial Sequence
  HTT spacer sequence TTCN PAM
ccgccuggggagacacgagg

SEQ ID NO: 38583 - RNA, 20 nt, Artificial Sequence
  HTT spacer sequence TTCN PAM
ucgacgagcucaagcagacc

SEQ ID NO: 38584 - RNA, 20 nt, Artificial Sequence
  HTT spacer sequence TTCN PAM
acgagcucaagcagaccaag

SEQ ID NO: 38585 - RNA, 20 nt, Artificial Sequence
  HTT spacer sequence TTCN PAM
cguacaccuuggcguugcgc

SEQ ID NO: 38586 - RNA, 20 nt, Artificial Sequence
  HTT spacer sequence TTCN PAM
agaugaccggcgagcgcagg

SEQ ID NO: 38587 - RNA, 20 nt, Artificial Sequence
  HTT spacer sequence TTCN PAM
aguacaggugggcgagcggg

SEQ ID NO: 38588 - RNA, 20 nt, Artificial Sequence
  HTT spacer sequence TTCN PAM
uggagcucugagucgggacg

SEQ ID NO: 38589 - RNA, 20 nt, Artificial Sequence
  HTT spacer sequence TTCN PAM
gcccauacccggccagagga

SEQ ID NO: 38590 - RNA, 20 nt, Artificial Sequence
  HTT spacer sequence TTCN PAM
gugggccccgucucaccccg

SEQ ID NO: 38591 - RNA, 20 nt, Artificial Sequence
  HTT spacer sequence TTCN PAM
auuggggaaguggggaaacu

SEQ ID NO: 38592 - RNA, 20 nt, Artificial Sequence
  HTT spacer sequence TTCN PAM
ccaauggaaggcugcacaca

SEQ ID NO: 38593 - RNA, 20 nt, Artificial Sequence
  HTT spacer sequence TTCN PAM
ccacuuccccaauggaaggc

SEQ ID NO: 38594 - RNA, 20 nt, Artificial Sequence
  HTT spacer sequence TTCN PAM
ugcccuugcugggccucagu

SEQ ID NO: 38595 - RNA, 20 nt, Artificial Sequence
  HTT spacer sequence TTCN PAM
ggggccuacugcgucauugg

SEQ ID NO: 38596 - RNA, 20 nt, Artificial Sequence
  HTT spacer sequence TTCN PAM
ccaaugacgcaguaggcccc

SEQ ID NO: 38597 - RNA, 20 nt, Artificial Sequence
  HTT spacer sequence TTCN PAM
cacuugcagucucaauuucc

SEQ ID NO: 38598 - RNA, 20 nt, Artificial Sequence
  HTT spacer sequence TTCN PAM
agaaaucaccaggugaggug

SEQ ID NO: 38599 - RNA, 20 nt, Artificial Sequence
  HTT spacer sequence TTCN PAM
ggaaauaccccaccgugacc

SEQ ID NO: 38600 - RNA, 20 nt, Artificial Sequence
  HTT spacer sequence TTCN PAM
caccguaagccccacccaug

SEQ ID NO: 38601 - RNA, 20 nt, Artificial Sequence
  HTT spacer sequence TTCN PAM
ucgcaccguaagccccaccc

SEQ ID NO: 38602 - RNA, 20 nt, Artificial Sequence
  HTT spacer sequence TTCN PAM
ucuucgcaccguaagcccca

SEQ ID NO: 38603 - RNA, 20 nt, Artificial Sequence
  HTT spacer sequence TTCN PAM
ugcccuggcaaccugcaggg

SEQ ID NO: 38604 - RNA, 20 nt, Artificial Sequence
  HTT spacer sequence TTCN PAM
cugcagguugccagggcagg

SEQ ID NO: 38605 - RNA, 20 nt, Artificial Sequence
  HTT spacer sequence TTCN PAM
ccccaccaugaccccugccc

SEQ ID NO: 38606 - RNA, 20 nt, Artificial Sequence
  HTT spacer sequence TTCN PAM
cacccugcaagacccucacc

SEQ ID NO: 38607 - RNA, 20 nt, Artificial Sequence
  HTT spacer sequence TTCN PAM
ccgcacaccuaugaccuuca

SEQ ID NO: 38608 - RNA, 20 nt, Artificial Sequence
  HTT spacer sequence TTCN PAM
agcucuugcugccacccucg

SEQ ID NO: 38609 - RNA, 20 nt, Artificial Sequence
  HTT spacer sequence TTCN PAM
cccccugcagcuuccagcuc

SEQ ID NO: 38610 - RNA, 20 nt, Artificial Sequence
  HTT spacer sequence TTCN PAM
aggaugggaguggccucacu

SEQ ID NO: 38611 - RNA, 20 nt, Artificial Sequence
  HTT spacer sequence TTCN PAM
gcugugcuggaggccggcuc

SEQ ID NO: 38612 - RNA, 20 nt, Artificial Sequence
  HTT spacer sequence TTCN PAM
cuucugcugugcuggaggcc

SEQ ID NO: 38613 - RNA, 20 nt, Artificial Sequence
  HTT spacer sequence TTCN PAM
ccacucccacuagggcuggg

SEQ ID NO: 38614 - RNA, 20 nt, Artificial Sequence
  HTT spacer sequence TTCN PAM
guugcguugauuugauuuuu

SEQ ID NO: 38615 - RNA, 20 nt, Artificial Sequence
  HTT spacer sequence TTCN PAM
gagccuugaaggaggggucc

SEQ ID NO: 38616 - RNA, 20 nt, Artificial Sequence
  HTT spacer sequence TTCN PAM
aggcucagaaaaaaucaaau

SEQ ID NO: 38617 - RNA, 20 nt, Artificial Sequence
  HTT spacer sequence TTCN PAM
gagguucgguggacacaggc

SEQ ID NO: 38618 - RNA, 20 nt, Artificial Sequence
  HTT spacer sequence TTCN PAM
guggacacaggcagcugccc

SEQ ID NO: 38619 - RNA, 20 nt, Artificial Sequence
  HTT spacer sequence TTCN PAM
cguggccuccuaguccugcu

SEQ ID NO: 38620 - RNA, 20 nt, Artificial Sequence
  HTT spacer sequence TTCN PAM
ucaccaggugccugagcagg

SEQ ID NO: 38621 - RNA, 20 nt, Artificial Sequence
  HTT spacer sequence TTCN PAM
agcaggcuccccucugacuc

SEQ ID NO: 38622 - RNA, 20 nt, Artificial Sequence
  HTT spacer sequence TTCN PAM
ugagucagaggggagccugc

SEQ ID NO: 38623 - RNA, 20 nt, Artificial Sequence
  HTT spacer sequence TTCN PAM
cgggcaccaccucccuggcu

SEQ ID NO: 38624 - RNA, 20 nt, Artificial Sequence
  HTT spacer sequence TTCN PAM
uuauuuaugcugaaagccuc

SEQ ID NO: 38625 - RNA, 20 nt, Artificial Sequence
  HTT spacer sequence TTCN PAM
gcauaaauaaugaauaaccu

SEQ ID NO: 38626 - RNA, 20 nt, Artificial Sequence
  HTT spacer sequence TTCN PAM
gagucccaggggaggguuuc

SEQ ID NO: 38627 - RNA, 20 nt, Artificial Sequence
  HTT spacer sequence TTCN PAM
gucuccauuccuggaggcug

SEQ ID NO: 38628 - RNA, 20 nt, Artificial Sequence
  HTT spacer sequence TTCN PAM
uggaggcugagagaugaggg

SEQ ID NO: 38629 - RNA, 20 nt, Artificial Sequence
  HTT spacer sequence TTCN PAM
ucagccaugacgugcagugc

SEQ ID NO: 38630 - RNA, 20 nt, Artificial Sequence
  HTT spacer sequence TTCN PAM
acaccgcagccccucagagc

SEQ ID NO: 38631 - RNA, 20 nt, Artificial Sequence
  HTT spacer sequence TTCN PAM
ccgagggggaagcugaggcc

SEQ ID NO: 38632 - RNA, 20 nt, Artificial Sequence
  HTT spacer sequence TTCN PAM
cccucggugaacuaaggcug

SEQ ID NO: 38633 - RNA, 20 nt, Artificial Sequence
  HTT spacer sequence TTCN PAM
ucugcuaaggacuauguggc

SEQ ID NO: 38634 - RNA, 20 nt, Artificial Sequence
  HTT spacer sequence TTCN PAM
uuauacccgcagucucccca

SEQ ID NO: 38635 - RNA, 20 nt, Artificial Sequence
  HTT spacer sequence TTCN PAM
uuuuuuuuucuuuuucuuuu

SEQ ID NO: 38636 - RNA, 20 nt, Artificial Sequence
  HTT spacer sequence TTCN PAM
uuuucuuuuuuuuuuuuuua

SEQ ID NO: 38637 - RNA, 20 nt, Artificial Sequence
  HTT spacer sequence TTCN PAM
uuuuuuuuuuuuuacaagaa

SEQ ID NO: 38638 - RNA, 20 nt, Artificial Sequence
  HTT spacer sequence TTCN PAM
uguaaaaaaaaaaaaaagaa

SEQ ID NO: 38639 - RNA, 20 nt, Artificial Sequence
  HTT spacer sequence TTCN PAM
gcccaacagccuuaauauau

SEQ ID NO: 38640 - RNA, 20 nt, Artificial Sequence
  HTT spacer sequence TTCN PAM
ucagcccaacagccuuaaua

SEQ ID NO: 38641 - RNA, 20 nt, Artificial Sequence
  HTT spacer sequence TTCN PAM
guggagcaugguuuguugaa

SEQ ID NO: 38642 - RNA, 20 nt, Artificial Sequence
  HTT spacer sequence TTCN PAM
acaaaccaugcuccacagaa

SEQ ID NO: 38643 - RNA, 20 nt, Artificial Sequence
  HTT spacer sequence TTCN PAM
caguguaggaggcccccaaa

SEQ ID NO: 38644 - RNA, 20 nt, Artificial Sequence
  HTT spacer sequence TTCN PAM
cguuucuccaaagagugggc

SEQ ID NO: 38645 - RNA, 20 nt, Artificial Sequence
  HTT spacer sequence TTCN PAM
ccaaagagugggcuggcuca

SEQ ID NO: 38646 - RNA, 20 nt, Artificial Sequence
  HTT spacer sequence TTCN PAM
cucucugcccuacuugagcc

SEQ ID NO: 38647 - RNA, 20 nt, Artificial Sequence
  HTT spacer sequence TTCN PAM
cagccacgugccacccuggg

SEQ ID NO: 38648 - RNA, 20 nt, Artificial Sequence
  HTT spacer sequence TTCN PAM
gaauccagcuuauuguuucc

SEQ ID NO: 38649 - RNA, 20 nt, Artificial Sequence
  HTT spacer sequence TTCN PAM
gaaugaggugcccccagcaa

SEQ ID NO: 38650 - RNA, 20 nt, Artificial Sequence
  HTT spacer sequence TTCN PAM
aacggccaauggccacaccc

SEQ ID NO: 38651 - RNA, 20 nt, Artificial Sequence
  HTT spacer sequence TTCN PAM
ucccuggccuggccagagcu

SEQ ID NO: 38652 - RNA, 20 nt, Artificial Sequence
  HTT spacer sequence TTCN PAM
cuggccuggccagagcuguc

SEQ ID NO: 38653 - RNA, 20 nt, Artificial Sequence
  HTT spacer sequence TTCN PAM
cacacugccugaugccucau

SEQ ID NO: 38654 - RNA, 20 nt, Artificial Sequence
  HTT spacer sequence TTCN PAM
accaagaauggcaugggagc

SEQ ID NO: 38655 - RNA, 20 nt, Artificial Sequence
  HTT spacer sequence TTCN PAM
ugguugaaccuacagucugg

SEQ ID NO: 38656 - RNA, 20 nt, Artificial Sequence
  HTT spacer sequence TTCN PAM
ccucucugagccucuauuuu

SEQ ID NO: 38657 - RNA, 20 nt, Artificial Sequence
  HTT spacer sequence TTCN PAM
uucaccucucugagccucua

SEQ ID NO: 38658 - RNA, 20 nt, Artificial Sequence
  HTT spacer sequence TTCN PAM
guguccacagcccugaguca

SEQ ID NO: 38659 - RNA, 20 nt, Artificial Sequence
  HTT spacer sequence TTCN PAM
cucccgaacaacacaguuau

SEQ ID NO: 38660 - RNA, 20 nt, Artificial Sequence
  HTT spacer sequence TTCN PAM
ggagagaaugccucagggag

SEQ ID NO: 38661 - RNA, 20 nt, Artificial Sequence
  HTT spacer sequence TTCN PAM
aaaugaauuauuuaaaaagc

SEQ ID NO: 38662 - RNA, 20 nt, Artificial Sequence
  HTT spacer sequence TTCN PAM
uuuugaaagguagaguaaua

SEQ ID NO: 38663 - RNA, 20 nt, Artificial Sequence
  HTT spacer sequence TTCN PAM
agacucucugcaaugagcaa

SEQ ID NO: 38664 - RNA, 20 nt, Artificial Sequence
  HTT spacer sequence TTCN PAM
auaguuucuagacucucugc

SEQ ID NO: 38665 - RNA, 20 nt, Artificial Sequence
  HTT spacer sequence TTCN PAM
cuugcuuuucuauaguuucu

SEQ ID NO: 38666 - RNA, 20 nt, Artificial Sequence
  HTT spacer sequence TTCN PAM
uuuuuaacaucugagcccgu

SEQ ID NO: 38667 - RNA, 20 nt, Artificial Sequence
  HTT spacer sequence TTCN PAM
ggaccuacacgggcucagau

SEQ ID NO: 38668 - RNA, 20 nt, Artificial Sequence
  HTT spacer sequence TTCN PAM
uucuaaguccauugucaucu

SEQ ID NO: 38669 - RNA, 20 nt, Artificial Sequence
  HTT spacer sequence TTCN PAM
aaguccauugucaucuugac

SEQ ID NO: 38670 - RNA, 20 nt, Artificial Sequence
  HTT spacer sequence TTCN PAM
cacccuuggcucuugugucu

SEQ ID NO: 38671 - RNA, 20 nt, Artificial Sequence
  HTT spacer sequence TTCN PAM
ggaaauuaaaaugcaugaca

SEQ ID NO: 38672 - RNA, 20 nt, Artificial Sequence
  HTT spacer sequence TTCN PAM
ugaaacgagagacacaagag

SEQ ID NO: 38673 - RNA, 20 nt, Artificial Sequence
  HTT spacer sequence TTCN PAM
ggccaagguccccgaguccu

SEQ ID NO: 38674 - RNA, 20 nt, Artificial Sequence
  HTT spacer sequence TTCN PAM
cguauaaccagugcuccuac

SEQ ID NO: 38675 - RNA, 20 nt, Artificial Sequence
  HTT spacer sequence TTCN PAM
uaggagcacugguuauacgg

SEQ ID NO: 38676 - RNA, 20 nt, Artificial Sequence
  HTT spacer sequence TTCN PAM
aggaugaucgcuccgacagc

SEQ ID NO: 38677 - RNA, 20 nt, Artificial Sequence
  HTT spacer sequence TTCN PAM
gguagugugucugcuugucc

SEQ ID NO: 38678 - RNA, 20 nt, Artificial Sequence
  HTT spacer sequence TTCN PAM
ccugcccugggguaucucag

SEQ ID NO: 38679 - RNA, 20 nt, Artificial Sequence
  HTT spacer sequence TTCN PAM
cuaaauggugggggcugaga

SEQ ID NO: 38680 - RNA, 20 nt, Artificial Sequence
  HTT spacer sequence TTCN PAM
gugcagcucaaaagugaugg

SEQ ID NO: 38681 - RNA, 20 nt, Artificial Sequence
  HTT spacer sequence TTCN PAM
uugacuucucuggccucagu

SEQ ID NO: 38682 - RNA, 20 nt, Artificial Sequence
  HTT spacer sequence TTCN PAM
cuggccucagucucccuccu

SEQ ID NO: 38683 - RNA, 20 nt, Artificial Sequence
  HTT spacer sequence TTCN PAM
cagaggguggcugggagcau

SEQ ID NO: 38684 - RNA, 20 nt, Artificial Sequence
  HTT spacer sequence TTCN PAM
cuccugugaugcucccagcc

SEQ ID NO: 38685 - RNA, 20 nt, Artificial Sequence
  HTT spacer sequence TTCN PAM
ggggucuggggcuuggucuc

SEQ ID NO: 38686 - RNA, 20 nt, Artificial Sequence
  HTT spacer sequence TTCN PAM
cugggcuccccaggcccacc

SEQ ID NO: 38687 - RNA, 20 nt, Artificial Sequence
  HTT spacer sequence TTCN PAM
agguaaaauagaaguuggcc

SEQ ID NO: 38688 - RNA, 20 nt, Artificial Sequence
  HTT spacer sequence TTCN PAM
auuuuaccuugaaagcccac

SEQ ID NO: 38689 - RNA, 20 nt, Artificial Sequence
  HTT spacer sequence TTCN PAM
ugccuccaaauggccaacuu

SEQ ID NO: 38690 - RNA, 20 nt, Artificial Sequence
  HTT spacer sequence TTCN PAM
uguucuugccuccaaauggc

SEQ ID NO: 38691 - RNA, 20 nt, Artificial Sequence
  HTT spacer sequence TTCN PAM
ccccugcccuggucuucaag

SEQ ID NO: 38692 - RNA, 20 nt, Artificial Sequence
  HTT spacer sequence TTCN PAM
agucuuucugacaggaggug

SEQ ID NO: 38693 - RNA, 20 nt, Artificial Sequence
  HTT spacer sequence TTCN PAM
gacaggaggugucagaaaag

SEQ ID NO: 38694 - RNA, 20 nt, Artificial Sequence
  HTT spacer sequence TTCN PAM
gacaccuccugucagaaaga

SEQ ID NO: 38695 - RNA, 20 nt, Artificial Sequence
  HTT spacer sequence TTCN PAM
cuacuaaagauacuuuucug

SEQ ID NO: 38696 - RNA, 20 nt, Artificial Sequence
  HTT spacer sequence TTCN PAM
cauugaagaccugagacaaa

SEQ ID NO: 38697 - RNA, 20 nt, Artificial Sequence
  HTT spacer sequence TTCN PAM
augagaaauccugagucaag

SEQ ID NO: 38698 - RNA, 20 nt, Artificial Sequence
  HTT spacer sequence TTCN PAM
agcugccagcaaaagcguuu

SEQ ID NO: 38699 - RNA, 20 nt, Artificial Sequence
  HTT spacer sequence TTCN PAM
uucuagcugccagcaaaagc

SEQ ID NO: 38700 - RNA, 20 nt, Artificial Sequence
  HTT spacer sequence TTCN PAM
cguggacugagcccaguucu

SEQ ID NO: 38701 - RNA, 20 nt, Artificial Sequence
  HTT spacer sequence TTCN PAM
cagacucagcugccuggggc

SEQ ID NO: 38702 - RNA, 20 nt, Artificial Sequence
  HTT spacer sequence TTCN PAM
gggaggucugcugagaccac

SEQ ID NO: 38703 - RNA, 20 nt, Artificial Sequence
  HTT spacer sequence TTCN PAM
gccucucuaccaaggugugc

SEQ ID NO: 38704 - RNA, 20 nt, Artificial Sequence
  HTT spacer sequence TTCN PAM
aggccgccgggagauaaggg

SEQ ID NO: 38705 - RNA, 20 nt, Artificial Sequence
  HTT spacer sequence TTCN PAM
uucugggaccucaguuuccc

SEQ ID NO: 38706 - RNA, 20 nt, Artificial Sequence
  HTT spacer sequence TTCN PAM
gggaccucaguuuccccauc

SEQ ID NO: 38707 - RNA, 20 nt, Artificial Sequence
  HTT spacer sequence TTCN PAM
ccaucugccuaaggccgggu

SEQ ID NO: 38708 - RNA, 20 nt, Artificial Sequence
  HTT spacer sequence TTCN PAM
cuacagggguccugaguacu

SEQ ID NO: 38709 - RNA, 20 nt, Artificial Sequence
  HTT spacer sequence TTCN PAM
ucucucccuggggguggucu

SEQ ID NO: 38710 - RNA, 20 nt, Artificial Sequence
  HTT spacer sequence TTCN PAM
cccaccaaacugggcaggug

SEQ ID NO: 38711 - RNA, 20 nt, Artificial Sequence
  HTT spacer sequence TTCN PAM
gggcugcagaggggcauauc

SEQ ID NO: 38712 - RNA, 20 nt, Artificial Sequence
  HTT spacer sequence TTCN PAM
agaccgaagggguguggauu

SEQ ID NO: 38713 - RNA, 20 nt, Artificial Sequence
  HTT spacer sequence TTCN PAM
gucuggaaagggugggaugu

SEQ ID NO: 38714 - RNA, 20 nt, Artificial Sequence
  HTT spacer sequence TTCN PAM
uucuuuuucuuuuuuuuuuu

SEQ ID NO: 38715 - RNA, 20 nt, Artificial Sequence
  HTT spacer sequence TTCN PAM
uuuucuuuuuuuuuuuuuuu

SEQ ID NO: 38716 - RNA, 20 nt, Artificial Sequence
  HTT spacer sequence TTCN PAM
uuuuuuuuuuuuuugagacg

SEQ ID NO: 38717 - RNA, 20 nt, Artificial Sequence
  HTT spacer sequence TTCN PAM
agcgauucuccugccucagc

SEQ ID NO: 38718 - RNA, 20 nt, Artificial Sequence
  HTT spacer sequence TTCN PAM
ccugccucagccucccgagu

SEQ ID NO: 38719 - RNA, 20 nt, Artificial Sequence
  HTT spacer sequence TTCN PAM
ccauguuggccaggcugguc

SEQ ID NO: 38720 - RNA, 20 nt, Artificial Sequence
  HTT spacer sequence TTCN PAM
agaccagccuggccaacaug

SEQ ID NO: 38721 - RNA, 20 nt, Artificial Sequence
  HTT spacer sequence TTCN PAM
gucaaaggcgguggguucug

SEQ ID NO: 38722 - RNA, 20 nt, Artificial Sequence
  HTT spacer sequence TTCN PAM
ggccccuccuuugcacaugg

SEQ ID NO: 38723 - RNA, 20 nt, Artificial Sequence
  HTT spacer sequence TTCN PAM
augugcaaaggaggggccag

SEQ ID NO: 38724 - RNA, 20 nt, Artificial Sequence
  HTT spacer sequence TTCN PAM
ccauuugcccaguaggauug

SEQ ID NO: 38725 - RNA, 20 nt, Artificial Sequence
  HTT spacer sequence TTCN PAM
aggucggaggagcggccggu

SEQ ID NO: 38726 - RNA, 20 nt, Artificial Sequence
  HTT spacer sequence TTCN PAM
ccggccgcuccuccgaccug

SEQ ID NO: 38727 - RNA, 20 nt, Artificial Sequence
  HTT spacer sequence TTCN PAM
ucaccggccgcuccuccgac

SEQ ID NO: 38728 - RNA, 20 nt, Artificial Sequence
  HTT spacer sequence TTCN PAM
gcagguggcagcucugcacc

SEQ ID NO: 38729 - RNA, 20 nt, Artificial Sequence
  HTT spacer sequence TTCN PAM
ucugcagguggcagcucugc

SEQ ID NO: 38730 - RNA, 20 nt, Artificial Sequence
  HTT spacer sequence TTCN PAM
accuggccucuggcaggaug

SEQ ID NO: 38731 - RNA, 20 nt, Artificial Sequence
  HTT spacer sequence TTCN PAM
gagggguauuuugaggaacc

SEQ ID NO: 38732 - RNA, 20 nt, Artificial Sequence
  HTT spacer sequence TTCN PAM
ucaaaauaccccucagaagg

SEQ ID NO: 38733 - RNA, 20 nt, Artificial Sequence
  HTT spacer sequence TTCN PAM
ugcuggagacuggagccuca

SEQ ID NO: 38734 - RNA, 20 nt, Artificial Sequence
  HTT spacer sequence TTCN PAM
ucggacacaggccagggccu

SEQ ID NO: 38735 - RNA, 20 nt, Artificial Sequence
  HTT spacer sequence TTCN PAM
cuccgaguaagaacguccua

SEQ ID NO: 38736 - RNA, 20 nt, Artificial Sequence
  HTT spacer sequence TTCN PAM
uacucggagugaaccccaga

SEQ ID NO: 38737 - RNA, 20 nt, Artificial Sequence
  HTT spacer sequence TTCN PAM
uucuugccuggaacgcacag

SEQ ID NO: 38738 - RNA, 20 nt, Artificial Sequence
  HTT spacer sequence TTCN PAM
ugccuggaacgcacaguuug

SEQ ID NO: 38739 - RNA, 20 nt, Artificial Sequence
  HTT spacer sequence TTCN PAM
aggcaagaaugaaaaaguau

SEQ ID NO: 38740 - RNA, 20 nt, Artificial Sequence
  HTT spacer sequence TTCN PAM
ggauccaucaaucagggcau

SEQ ID NO: 38741 - RNA, 20 nt, Artificial Sequence
  HTT spacer sequence TTCN PAM
uuuucgggauccaucaauca

SEQ ID NO: 38742 - RNA, 20 nt, Artificial Sequence
  HTT spacer sequence TTCN PAM
aucugcuuucauuuucggga

SEQ ID NO: 38743 - RNA, 20 nt, Artificial Sequence
  HTT spacer sequence TTCN PAM
ggagagagcucccccagcuc

SEQ ID NO: 38744 - RNA, 20 nt, Artificial Sequence
  HTT spacer sequence TTCN PAM
cuucaggagagagcuccccc

SEQ ID NO: 38745 - RNA, 20 nt, Artificial Sequence
  HTT spacer sequence TTCN PAM
ucaggcgucagaggccauuu

SEQ ID NO: 38746 - RNA, 20 nt, Artificial Sequence
  HTT spacer sequence TTCN PAM
aggaggcuuuuauucagcuc

SEQ ID NO: 38747 - RNA, 20 nt, Artificial Sequence
  HTT spacer sequence TTCN PAM
gcucuguuuggagcaucagg

SEQ ID NO: 38748 - RNA, 20 nt, Artificial Sequence
  HTT spacer sequence TTCN PAM
acugccuccuuagcaaugac

SEQ ID NO: 38749 - RNA, 20 nt, Artificial Sequence
  HTT spacer sequence TTCN PAM
caugcacagcccuguugagu

SEQ ID NO: 38750 - RNA, 20 nt, Artificial Sequence
  HTT spacer sequence TTCN PAM
gggugcuggagauaucaugg

SEQ ID NO: 38751 - RNA, 20 nt, Artificial Sequence
  HTT spacer sequence TTCN PAM
ccgcaugggagcauaagcuc

SEQ ID NO: 38752 - RNA, 20 nt, Artificial Sequence
  HTT spacer sequence TTCN PAM
cuacugacccaugugucuuc

SEQ ID NO: 38753 - RNA, 20 nt, Artificial Sequence
  HTT spacer sequence TTCN PAM
agcacuuaucacaaccugca

SEQ ID NO: 38754 - RNA, 20 nt, Artificial Sequence
  HTT spacer sequence TTCN PAM
cagcuccacguaugucugcc

SEQ ID NO: 38755 - RNA, 20 nt, Artificial Sequence
  HTT spacer sequence TTCN PAM
cuguguggccacuguuccca

SEQ ID NO: 38756 - RNA, 20 nt, Artificial Sequence
  HTT spacer sequence TTCN PAM
cacuggccguucccugugug

SEQ ID NO: 38757 - RNA, 20 nt, Artificial Sequence
  HTT spacer sequence TTCN PAM
guggccuggcugcuggccac

SEQ ID NO: 38758 - RNA, 20 nt, Artificial Sequence
  HTT spacer sequence TTCN PAM
ugcuuuucaagcuuaguggg

SEQ ID NO: 38759 - RNA, 20 nt, Artificial Sequence
  HTT spacer sequence TTCN PAM
agcuuagugggagucuuuug

SEQ ID NO: 38760 - RNA, 20 nt, Artificial Sequence
  HTT spacer sequence TTCN PAM
accaguuucaaacucuuucu

SEQ ID NO: 38761 - RNA, 20 nt, Artificial Sequence
  HTT spacer sequence TTCN PAM
aacucuuucuagaagcucca

SEQ ID NO: 38762 - RNA, 20 nt, Artificial Sequence
  HTT spacer sequence TTCN PAM
agaagcuccagcuuucccaa

SEQ ID NO: 38763 - RNA, 20 nt, Artificial Sequence
  HTT spacer sequence TTCN PAM
agaaagaguuugaaacuggu

SEQ ID NO: 38764 - RNA, 20 nt, Artificial Sequence
  HTT spacer sequence TTCN PAM
caaagcugaauucucuauga

SEQ ID NO: 38765 - RNA, 20 nt, Artificial Sequence
  HTT spacer sequence TTCN PAM
gcuuugggaaagcuggagcu

SEQ ID NO: 38766 - RNA, 20 nt, Artificial Sequence
  HTT spacer sequence TTCN PAM
cuaugagccuccuuggccgg

SEQ ID NO: 38767 - RNA, 20 nt, Artificial Sequence
  HTT spacer sequence TTCN PAM
aggaggugacucaaacacac

SEQ ID NO: 38768 - RNA, 20 nt, Artificial Sequence
  HTT spacer sequence TTCN PAM
auuugggcagcaacuugccu

SEQ ID NO: 38769 - RNA, 20 nt, Artificial Sequence
  HTT spacer sequence TTCN PAM
ccugcugacccaccugccaa

SEQ ID NO: 38770 - RNA, 20 nt, Artificial Sequence
  HTT spacer sequence TTCN PAM
gaaaaaucucccucuggcug

SEQ ID NO: 38771 - RNA, 20 nt, Artificial Sequence
  HTT spacer sequence TTCN PAM
gaacccugagucaaaccaug

SEQ ID NO: 38772 - RNA, 20 nt, Artificial Sequence
  HTT spacer sequence TTCN PAM
cacaggcaggccgagggcac

SEQ ID NO: 38773 - RNA, 20 nt, Artificial Sequence
  HTT spacer sequence TTCN PAM
guggagcccaaaggggagcu

SEQ ID NO: 38774 - RNA, 20 nt, Artificial Sequence
  HTT spacer sequence TTCN PAM
cuucacucugaggguccugg

SEQ ID NO: 38775 - RNA, 20 nt, Artificial Sequence
  HTT spacer sequence TTCN PAM
cucugaggguccuggagcuc

SEQ ID NO: 38776 - RNA, 20 nt, Artificial Sequence
  HTT spacer sequence TTCN PAM
agcugccagaugacgccgcu

SEQ ID NO: 38777 - RNA, 20 nt, Artificial Sequence
  HTT spacer sequence TTCN PAM
caaccacagggucagcggcg

SEQ ID NO: 38778 - RNA, 20 nt, Artificial Sequence
  HTT spacer sequence TTCN PAM
cggcaggugcuauggcagcc

SEQ ID NO: 38779 - RNA, 20 nt, Artificial Sequence
  HTT spacer sequence TTCN PAM
gcuucucggcaggugcuaug

SEQ ID NO: 38780 - RNA, 20 nt, Artificial Sequence
  HTT spacer sequence TTCN PAM
uucugcuucucggcaggugc

SEQ ID NO: 38781 - RNA, 20 nt, Artificial Sequence
  HTT spacer sequence TTCN PAM
agcuccgggacccacccgcc

SEQ ID NO: 38782 - RNA, 20 nt, Artificial Sequence
  HTT spacer sequence TTCN PAM
uggguggugucuugccuacg

SEQ ID NO: 38783 - RNA, 20 nt, Artificial Sequence
  HTT spacer sequence TTCN PAM
cagcaucuaggguggcacag

SEQ ID NO: 38784 - RNA, 20 nt, Artificial Sequence
  HTT spacer sequence TTCN PAM
ccagccuccuaacagggagc

SEQ ID NO: 38785 - RNA, 20 nt, Artificial Sequence
  HTT spacer sequence TTCN PAM
cucucgagggcuugugacug

SEQ ID NO: 38786 - RNA, 20 nt, Artificial Sequence
  HTT spacer sequence TTCN PAM
ugccagggccgcgggcaccc

SEQ ID NO: 38787 - RNA, 20 nt, Artificial Sequence
  HTT spacer sequence TTCN PAM
aaaugauguagcaacuucuu

SEQ ID NO: 38788 - RNA, 20 nt, Artificial Sequence
  HTT spacer sequence TTCN PAM
ucacccugaaacugcuguag

SEQ ID NO: 38789 - RNA, 20 nt, Artificial Sequence
  HTT spacer sequence TTCN PAM
cccugaaacugcuguagagu

SEQ ID NO: 38790 - RNA, 20 nt, Artificial Sequence
  HTT spacer sequence TTCN PAM
gggugaagaaguugcuacau

SEQ ID NO: 38791 - RNA, 20 nt, Artificial Sequence
  HTT spacer sequence TTCN PAM
guaacugccaggcauccggg

SEQ ID NO: 38792 - RNA, 20 nt, Artificial Sequence
  HTT spacer sequence TTCN PAM
aacccaagcacagcagcgac

SEQ ID NO: 38793 - RNA, 20 nt, Artificial Sequence
  HTT spacer sequence TTCN PAM
ucucgcccucucuaaucaga

SEQ ID NO: 38794 - RNA, 20 nt, Artificial Sequence
  HTT spacer sequence TTCN PAM
cgcccucucuaaucagaguc

SEQ ID NO: 38795 - RNA, 20 nt, Artificial Sequence
  HTT spacer sequence TTCN PAM
ugcccuuccaucaccuuaga

SEQ ID NO: 38796 - RNA, 20 nt, Artificial Sequence
  HTT spacer sequence TTCN PAM
aucaccuuagagaaggggca

SEQ ID NO: 38797 - RNA, 20 nt, Artificial Sequence
  HTT spacer sequence TTCN PAM
cuaaggugauggaagggcau

SEQ ID NO: 38798 - RNA, 20 nt, Artificial Sequence
  HTT spacer sequence TTCN PAM
ccaggcuggagcagcaucgc

SEQ ID NO: 38799 - RNA, 20 nt, Artificial Sequence
  HTT spacer sequence TTCN PAM
gcugacaugaggcgaugcug

SEQ ID NO: 38800 - RNA, 20 nt, Artificial Sequence
  HTT spacer sequence TTCN PAM
acagcugaguucugcugaca

SEQ ID NO: 38801 - RNA, 20 nt, Artificial Sequence
  HTT spacer sequence TTCN PAM
ucagcagcauguccuuaaca

SEQ ID NO: 38802 - RNA, 20 nt, Artificial Sequence
  HTT spacer sequence TTCN PAM
gauuucuuccuuaguuguug

SEQ ID NO: 38803 - RNA, 20 nt, Artificial Sequence
  HTT spacer sequence TTCN PAM
uccuuaguuguugguccauu

SEQ ID NO: 38804 - RNA, 20 nt, Artificial Sequence
  HTT spacer sequence TTCN PAM
uuaguuguugguccauuaag

SEQ ID NO: 38805 - RNA, 20 nt, Artificial Sequence
  HTT spacer sequence TTCN PAM
ccuuaauggaccaacaacua

SEQ ID NO: 38806 - RNA, 20 nt, Artificial Sequence
  HTT spacer sequence TTCN PAM
gcaaagcagcauguuaacau

SEQ ID NO: 38807 - RNA, 20 nt, Artificial Sequence
  HTT spacer sequence TTCN PAM
auguuaacaugcugcuuugc

SEQ ID NO: 38808 - RNA, 20 nt, Artificial Sequence
  HTT spacer sequence TTCN PAM
aguuuucaauguuaacaugc

SEQ ID NO: 38809 - RNA, 20 nt, Artificial Sequence
  HTT spacer sequence TTCN PAM
ccuguaguauuucauguugu

SEQ ID NO: 38810 - RNA, 20 nt, Artificial Sequence
  HTT spacer sequence TTCN PAM
uguuguuuugacguuuuuag

SEQ ID NO: 38811 - RNA, 20 nt, Artificial Sequence
  HTT spacer sequence TTCN PAM
cgccuguaaucccagcacuu

SEQ ID NO: 38812 - RNA, 20 nt, Artificial Sequence
  HTT spacer sequence TTCN PAM
agaccagccugaccaacaug

SEQ ID NO: 38813 - RNA, 20 nt, Artificial Sequence
  HTT spacer sequence TTCN PAM
ccauguuggucaggcugguc

SEQ ID NO: 38814 - RNA, 20 nt, Artificial Sequence
  HTT spacer sequence TTCN PAM
ccugccucagccucccaagu

SEQ ID NO: 38815 - RNA, 20 nt, Artificial Sequence
  HTT spacer sequence TTCN PAM
agcgauucuccugccucagc

SEQ ID NO: 38816 - RNA, 20 nt, Artificial Sequence
  HTT spacer sequence TTCN PAM
cugucacccaggcuggagug

SEQ ID NO: 38817 - RNA, 20 nt, Artificial Sequence
  HTT spacer sequence TTCN PAM
uauccugcuuauuuuauuua

SEQ ID NO: 38818 - RNA, 20 nt, Artificial Sequence
  HTT spacer sequence TTCN PAM
uuucuuauccugcuuauuuu

SEQ ID NO: 38819 - RNA, 20 nt, Artificial Sequence
  HTT spacer sequence TTCN PAM
ucauuucuuauccugcuuau

SEQ ID NO: 38820 - RNA, 20 nt, Artificial Sequence
  HTT spacer sequence TTCN PAM
gauuucauuuuuguauaccc

SEQ ID NO: 38821 - RNA, 20 nt, Artificial Sequence
  HTT spacer sequence TTCN PAM
uuuuuguauacccagaaagc

SEQ ID NO: 38822 - RNA, 20 nt, Artificial Sequence
  HTT spacer sequence TTCN PAM
ggguauacaaaaaugaaauc

SEQ ID NO: 38823 - RNA, 20 nt, Artificial Sequence
  HTT spacer sequence TTCN PAM
acaaguuuaagcugguuuaa

SEQ ID NO: 38824 - RNA, 20 nt, Artificial Sequence
  HTT spacer sequence TTCN PAM
uccucauuuucaacaaguuu

SEQ ID NO: 38825 - RNA, 20 nt, Artificial Sequence
  HTT spacer sequence TTCN PAM
ucauccucauuuucaacaag

SEQ ID NO: 38826 - RNA, 20 nt, Artificial Sequence
  HTT spacer sequence TTCN PAM
gaguuggaaugaauuuaacc

SEQ ID NO: 38827 - RNA, 20 nt, Artificial Sequence
  HTT spacer sequence TTCN PAM
aacucugaaugggauauuuc

SEQ ID NO: 38828 - RNA, 20 nt, Artificial Sequence
  HTT spacer sequence TTCN PAM
uuccaacucugaaugggaua

SEQ ID NO: 38829 - RNA, 20 nt, Artificial Sequence
  HTT spacer sequence TTCN PAM
ggguuaaauucauuccaacu

SEQ ID NO: 38830 - RNA, 20 nt, Artificial Sequence
  HTT spacer sequence TTCN PAM
uucuggguuaaauucauucc

SEQ ID NO: 38831 - RNA, 20 nt, Artificial Sequence
  HTT spacer sequence TTCN PAM
guagagguccuguuccuucu

SEQ ID NO: 38832 - RNA, 20 nt, Artificial Sequence
  HTT spacer sequence TTCN PAM
cuucaguagagguccuguuc

SEQ ID NO: 38833 - RNA, 20 nt, Artificial Sequence
  HTT spacer sequence TTCN PAM
guaagacugcauaguucucu

SEQ ID NO: 38834 - RNA, 20 nt, Artificial Sequence
  HTT spacer sequence TTCN PAM
ccagcgcucagguauuauuu

SEQ ID NO: 38835 - RNA, 20 nt, Artificial Sequence
  HTT spacer sequence TTCN PAM
cacacuccugaaagcuccaa

SEQ ID NO: 38836 - RNA, 20 nt, Artificial Sequence
  HTT spacer sequence TTCN PAM
ggagugugcgaaguuucucc

SEQ ID NO: 38837 - RNA, 20 nt, Artificial Sequence
  HTT spacer sequence TTCN PAM
aaacauagucucaauaauau

SEQ ID NO: 38838 - RNA, 20 nt, Artificial Sequence
  HTT spacer sequence TTCN PAM
ugguuuugacauggacgcga

SEQ ID NO: 38839 - RNA, 20 nt, Artificial Sequence
  HTT spacer sequence TTCN PAM
uaugaaaaaagaacggggcc

SEQ ID NO: 38840 - RNA, 20 nt, Artificial Sequence
  HTT spacer sequence TTCN PAM
uaugaauuuaaacaucaucg

SEQ ID NO: 38841 - RNA, 20 nt, Artificial Sequence
  HTT spacer sequence TTCN PAM
uuuuucauaugaauuuaaac

SEQ ID NO: 38842 - RNA, 20 nt, Artificial Sequence
  HTT spacer sequence TTCN PAM
cacgcugacuggccuuggac

SEQ ID NO: 38843 - RNA, 20 nt, Artificial Sequence
  HTT spacer sequence TTCN PAM
aacuccccgacuccgaggga

SEQ ID NO: 38844 - RNA, 20 nt, Artificial Sequence
  HTT spacer sequence TTCN PAM
uccuggccuccagcagccac

SEQ ID NO: 38845 - RNA, 20 nt, Artificial Sequence
  HTT spacer sequence TTCN PAM
cgacguucguccuggccucc

SEQ ID NO: 38846 - RNA, 20 nt, Artificial Sequence
  HTT spacer sequence TTCN PAM
aggagcaauuuggugucccg

SEQ ID NO: 38847 - RNA, 20 nt, Artificial Sequence
  HTT spacer sequence TTCN PAM
gcuuuaggacgggacaccaa

SEQ ID NO: 38848 - RNA, 20 nt, Artificial Sequence
  HTT spacer sequence TTCN PAM
ucagcuuuaggacgggacac

SEQ ID NO: 38849 - RNA, 20 nt, Artificial Sequence
  HTT spacer sequence TTCN PAM
ucuggucagugccacuccua

SEQ ID NO: 38850 - RNA, 20 nt, Artificial Sequence
  HTT spacer sequence TTCN PAM
ccguguuagccaggaugauc

SEQ ID NO: 38851 - RNA, 20 nt, Artificial Sequence
  HTT spacer sequence TTCN PAM
ccuggcucagccucccaagu

SEQ ID NO: 38852 - RNA, 20 nt, Artificial Sequence
  HTT spacer sequence TTCN PAM
cgccauucuccuggcucagc

SEQ ID NO: 38853 - RNA, 20 nt, Artificial Sequence
  HTT spacer sequence TTCN PAM
uuaaaagugccaaagaacuu

SEQ ID NO: 38854 - RNA, 20 nt, Artificial Sequence
  HTT spacer sequence TTCN PAM
uuggcacuuuuaaugaauuu

SEQ ID NO: 38855 - RNA, 20 nt, Artificial Sequence
  HTT spacer sequence TTCN PAM
aaugaccaauauuaauacac

SEQ ID NO: 38856 - RNA, 20 nt, Artificial Sequence
  HTT spacer sequence TTCN PAM
aauguguauuaauauugguc

SEQ ID NO: 38857 - RNA, 20 nt, Artificial Sequence
  HTT spacer sequence TTCN PAM
aauaagauauucuaaugugu

SEQ ID NO: 38858 - RNA, 20 nt, Artificial Sequence
  HTT spacer sequence TTCN PAM
aaaggucucagguuuaauuu

SEQ ID NO: 38859 - RNA, 20 nt, Artificial Sequence
  HTT spacer sequence TTCN PAM
uuucaaaauagcaauaaacc

SEQ ID NO: 38860 - RNA, 20 nt, Artificial Sequence
  HTT spacer sequence TTCN PAM
aaauagcaauaaacccauga

SEQ ID NO: 38861 - RNA, 20 nt, Artificial Sequence
  HTT spacer sequence TTCN PAM
uacaauuguuauuuauguua

SEQ ID NO: 38862 - RNA, 20 nt, Artificial Sequence
  HTT spacer sequence TTCN PAM
aaaacaaaaaguuuucggga

SEQ ID NO: 38863 - RNA, 20 nt, Artificial Sequence
  HTT spacer sequence TTCN PAM
ggagaaguguggcauaguuu

SEQ ID NO: 38864 - RNA, 20 nt, Artificial Sequence
  HTT spacer sequence TTCN PAM
cccgaaaacuuuuuguuuug

SEQ ID NO: 38865 - RNA, 20 nt, Artificial Sequence
  HTT spacer sequence TTCN PAM
cuuaagccagagauuuacga

SEQ ID NO: 38866 - RNA, 20 nt, Artificial Sequence
  HTT spacer sequence TTCN PAM
caaccaaaacacccccaaag

SEQ ID NO: 38867 - RNA, 20 nt, Artificial Sequence
  HTT spacer sequence TTCN PAM
cuccuauacuucacaaccaa

SEQ ID NO: 38868 - RNA, 20 nt, Artificial Sequence
  HTT spacer sequence TTCN PAM
ccauucacuccuauacuuca

SEQ ID NO: 38869 - RNA, 20 nt, Artificial Sequence
  HTT spacer sequence TTCN PAM
uacccagauguguauuugaa

SEQ ID NO: 38870 - RNA, 20 nt, Artificial Sequence
  HTT spacer sequence TTCN PAM
aauacacaucuggguaagaa

SEQ ID NO: 38871 - RNA, 20 nt, Artificial Sequence
  HTT spacer sequence TTCN PAM
uuucaaauacacaucugggu

SEQ ID NO: 38872 - RNA, 20 nt, Artificial Sequence
  HTT spacer sequence TTCN PAM
uuuucuuuucaaauacacau

SEQ ID NO: 38873 - RNA, 20 nt, Artificial Sequence
  HTT spacer sequence TTCN PAM
uccgugauccuauuccaaca

SEQ ID NO: 38874 - RNA, 20 nt, Artificial Sequence
  HTT spacer sequence TTCN PAM
gugauccuauuccaacacug

SEQ ID NO: 38875 - RNA, 20 nt, Artificial Sequence
  HTT spacer sequence TTCN PAM
aacacuggacaggugguggu

SEQ ID NO: 38876 - RNA, 20 nt, Artificial Sequence
  HTT spacer sequence TTCN PAM
gcucacugcaagcuccgccu

SEQ ID NO: 38877 - RNA, 20 nt, Artificial Sequence
  HTT spacer sequence TTCN PAM
cugcaagcucugccucccgg

SEQ ID NO: 38878 - RNA, 20 nt, Artificial Sequence
  HTT spacer sequence TTCN PAM
cgccauucuccugccucagc

SEQ ID NO: 38879 - RNA, 20 nt, Artificial Sequence
  HTT spacer sequence TTCN PAM
ccugccucagccuccugagu

SEQ ID NO: 38880 - RNA, 20 nt, Artificial Sequence
  HTT spacer sequence TTCN PAM
cuguguuagccaggaugguc

SEQ ID NO: 38881 - RNA, 20 nt, Artificial Sequence
  HTT spacer sequence TTCN PAM
agcacuuugggaggccgagg

SEQ ID NO: 38882 - RNA, 20 nt, Artificial Sequence
  HTT spacer sequence TTCN PAM
acacacaaccggccaguaaa

SEQ ID NO: 38883 - RNA, 20 nt, Artificial Sequence
  HTT spacer sequence TTCN PAM
uugauaggguaucagauucc

SEQ ID NO: 38884 - RNA, 20 nt, Artificial Sequence
  HTT spacer sequence TTCN PAM
acuucauuucaggagaaucc

SEQ ID NO: 38885 - RNA, 20 nt, Artificial Sequence
  HTT spacer sequence TTCN PAM
uuucaggagaauccauuggu

SEQ ID NO: 38886 - RNA, 20 nt, Artificial Sequence
  HTT spacer sequence TTCN PAM
ggagaauccauugguccguc

SEQ ID NO: 38887 - RNA, 20 nt, Artificial Sequence
  HTT spacer sequence TTCN PAM
ccugaaaugaaguagaaguu

SEQ ID NO: 38888 - RNA, 20 nt, Artificial Sequence
  HTT spacer sequence TTCN PAM
aggacucuguccaucaugcc

SEQ ID NO: 38889 - RNA, 20 nt, Artificial Sequence
  HTT spacer sequence TTCN PAM
cuaaguuaugcggauauucc

SEQ ID NO: 38890 - RNA, 20 nt, Artificial Sequence
  HTT spacer sequence TTCN PAM
aaaugcugacacaguuccuu

SEQ ID NO: 38891 - RNA, 20 nt, Artificial Sequence
  HTT spacer sequence TTCN PAM
uuaaucaguauuuuaaaauc

SEQ ID NO: 38892 - RNA, 20 nt, Artificial Sequence
  HTT spacer sequence TTCN PAM
aagauuggugauaucgccaa

SEQ ID NO: 38893 - RNA, 20 nt, Artificial Sequence
  HTT spacer sequence TTCN PAM
guuggaaagguggugaacuc

SEQ ID NO: 38894 - RNA, 20 nt, Artificial Sequence
  HTT spacer sequence TTCN PAM
aacugaaagacuuuucuaag

SEQ ID NO: 38895 - RNA, 20 nt, Artificial Sequence
  HTT spacer sequence TTCN PAM
ccaccuuuccaacugaaaga

SEQ ID NO: 38896 - RNA, 20 nt, Artificial Sequence
  HTT spacer sequence TTCN PAM
gaauucugauuuuugcauga

SEQ ID NO: 38897 - RNA, 20 nt, Artificial Sequence
  HTT spacer sequence TTCN PAM
gaaagacaccaccaugaguu

SEQ ID NO: 38898 - RNA, 20 nt, Artificial Sequence
  HTT spacer sequence TTCN PAM
gauuuuugcaugaaagcuug

SEQ ID NO: 38899 - RNA, 20 nt, Artificial Sequence
  HTT spacer sequence TTCN PAM
ugcaaaaaucagaauucuga

SEQ ID NO: 38900 - RNA, 20 nt, Artificial Sequence
  HTT spacer sequence TTCN PAM
agcuuucaugcaaaaaucag

SEQ ID NO: 38901 - RNA, 20 nt, Artificial Sequence
  HTT spacer sequence TTCN PAM
uugaaugagacaggcucacu

SEQ ID NO: 38902 - RNA, 20 nt, Artificial Sequence
  HTT spacer sequence TTCN PAM
aagaaaauagcugacagcau

SEQ ID NO: 38903 - RNA, 20 nt, Artificial Sequence
  HTT spacer sequence TTCN PAM
uuuuccaaaaaaaaaaaguc

SEQ ID NO: 38904 - RNA, 20 nt, Artificial Sequence
  HTT spacer sequence TTCN PAM
aaaaaaaaaaagucugccag

SEQ ID NO: 38905 - RNA, 20 nt, Artificial Sequence
  HTT spacer sequence TTCN PAM
gccuuggguguccuggcaga

SEQ ID NO: 38906 - RNA, 20 nt, Artificial Sequence
  HTT spacer sequence TTCN PAM
agauccagacggcagcucag

SEQ ID NO: 38907 - RNA, 20 nt, Artificial Sequence
  HTT spacer sequence TTCN PAM
ucagcguggacguggggcag

SEQ ID NO: 38908 - RNA, 20 nt, Artificial Sequence
  HTT spacer sequence TTCN PAM
aguugcucgggcaggacguu

SEQ ID NO: 38909 - RNA, 20 nt, Artificial Sequence
  HTT spacer sequence TTCN PAM
acguccugcccgagcaacug

SEQ ID NO: 38910 - RNA, 20 nt, Artificial Sequence
  HTT spacer sequence TTCN PAM
cuccaucacggacauuugga

SEQ ID NO: 38911 - RNA, 20 nt, Artificial Sequence
  HTT spacer sequence TTCN PAM
aaauguccgugauggaguga

SEQ ID NO: 38912 - RNA, 20 nt, Artificial Sequence
  HTT spacer sequence TTCN PAM
cacugcagcugugcggugcg

SEQ ID NO: 38913 - RNA, 20 nt, Artificial Sequence
  HTT spacer sequence TTCN PAM
caccgcacagcugcagugug

SEQ ID NO: 38914 - RNA, 20 nt, Artificial Sequence
  HTT spacer sequence TTCN PAM
ugcucaggucuugccacauc

SEQ ID NO: 38915 - RNA, 20 nt, Artificial Sequence
  HTT spacer sequence TTCN PAM
cggagcugacaugcgcacug

SEQ ID NO: 38916 - RNA, 20 nt, Artificial Sequence
  HTT spacer sequence TTCN PAM
cggggucuucacggagcuga

SEQ ID NO: 38917 - RNA, 20 nt, Artificial Sequence
  HTT spacer sequence TTCN PAM
ucauagucugaugaucacgg

SEQ ID NO: 38918 - RNA, 20 nt, Artificial Sequence
  HTT spacer sequence TTCN PAM
caggucucggccuguggguc

SEQ ID NO: 38919 - RNA, 20 nt, Artificial Sequence
  HTT spacer sequence TTCN PAM
ggcagugguucucaggucuc

SEQ ID NO: 38920 - RNA, 20 nt, Artificial Sequence
  HTT spacer sequence TTCN PAM
cacacgcugucugugaugac

SEQ ID NO: 38921 - RNA, 20 nt, Artificial Sequence
  HTT spacer sequence TTCN PAM
accugacccuauccccagug

SEQ ID NO: 38922 - RNA, 20 nt, Artificial Sequence
  HTT spacer sequence TTCN PAM
aguugaggguggggcuagac

SEQ ID NO: 38923 - RNA, 20 nt, Artificial Sequence
  HTT spacer sequence TTCN PAM
aacauacuagacacuuacgu

SEQ ID NO: 38924 - RNA, 20 nt, Artificial Sequence
  HTT spacer sequence TTCN PAM
agggaaauaaggcuguaggg

SEQ ID NO: 38925 - RNA, 20 nt, Artificial Sequence
  HTT spacer sequence TTCN PAM
cuggaaagcaccucucuucu

SEQ ID NO: 38926 - RNA, 20 nt, Artificial Sequence
  HTT spacer sequence TTCN PAM
cucaccccacggcuccaauc

SEQ ID NO: 38927 - RNA, 20 nt, Artificial Sequence
  HTT spacer sequence TTCN PAM
aaaaaugucaugugagcgga

SEQ ID NO: 38928 - RNA, 20 nt, Artificial Sequence
  HTT spacer sequence TTCN PAM
gcugggacaagagagucccg

SEQ ID NO: 38929 - RNA, 20 nt, Artificial Sequence
  HTT spacer sequence TTCN PAM
auccuccccuaggccaggau

SEQ ID NO: 38930 - RNA, 20 nt, Artificial Sequence
  HTT spacer sequence TTCN PAM
ccaugcccgggcaacagcca

SEQ ID NO: 38931 - RNA, 20 nt, Artificial Sequence
  HTT spacer sequence TTCN PAM
gguuuuuccccaugcccggg

SEQ ID NO: 38932 - RNA, 20 nt, Artificial Sequence
  HTT spacer sequence TTCN PAM
gaguccuggagauggccacg

SEQ ID NO: 38933 - RNA, 20 nt, Artificial Sequence
  HTT spacer sequence TTCN PAM
cccacacgcuccaccuugcg

SEQ ID NO: 38934 - RNA, 20 nt, Artificial Sequence
  HTT spacer sequence TTCN PAM
gcccaaguucaucucagcug

SEQ ID NO: 38935 - RNA, 20 nt, Artificial Sequence
  HTT spacer sequence TTCN PAM
ucucagcuggguccggaggg

SEQ ID NO: 38936 - RNA, 20 nt, Artificial Sequence
  HTT spacer sequence TTCN PAM
agggguagggugcccucucc

SEQ ID NO: 38937 - RNA, 20 nt, Artificial Sequence
  HTT spacer sequence TTCN PAM
acuguaagaugcucguguuc

SEQ ID NO: 38938 - RNA, 20 nt, Artificial Sequence
  HTT spacer sequence TTCN PAM
aacuggcuuuuucuacugua

SEQ ID NO: 38939 - RNA, 20 nt, Artificial Sequence
  HTT spacer sequence TTCN PAM
aaaauagaagccaagaacug

SEQ ID NO: 38940 - RNA, 20 nt, Artificial Sequence
  HTT spacer sequence TTCN PAM
auuuuagaagguaaggcggu

SEQ ID NO: 38941 - RNA, 20 nt, Artificial Sequence
  HTT spacer sequence TTCN PAM
uggcuucuauuuuagaaggu

SEQ ID NO: 38942 - RNA, 20 nt, Artificial Sequence
  HTT spacer sequence TTCN PAM
cggcuuggcuggucaugucc

SEQ ID NO: 38943 - RNA, 20 nt, Artificial Sequence
  HTT spacer sequence TTCN PAM
caugugcgcaguguucacgg

SEQ ID NO: 38944 - RNA, 20 nt, Artificial Sequence
  HTT spacer sequence TTCN PAM
ugguacauccguggcuugug

SEQ ID NO: 38945 - RNA, 20 nt, Artificial Sequence
  HTT spacer sequence TTCN PAM
cugagcugaggggagccugu

SEQ ID NO: 38946 - RNA, 20 nt, Artificial Sequence
  HTT spacer sequence TTCN PAM
cugcccucuguuuaucuccg

SEQ ID NO: 38947 - RNA, 20 nt, Artificial Sequence
  HTT spacer sequence TTCN PAM
cugcuuuccgucaaggcuaa

SEQ ID NO: 38948 - RNA, 20 nt, Artificial Sequence
  HTT spacer sequence TTCN PAM
gucaaggcuaaucugcucuc

SEQ ID NO: 38949 - RNA, 20 nt, Artificial Sequence
  HTT spacer sequence TTCN PAM
uagggagugcaaggucgggc

SEQ ID NO: 38950 - RNA, 20 nt, Artificial Sequence
  HTT spacer sequence TTCN PAM
ccaaacgucacagccuuucu

SEQ ID NO: 38951 - RNA, 20 nt, Artificial Sequence
  HTT spacer sequence TTCN PAM
cugauccuuuuuccagguag

SEQ ID NO: 38952 - RNA, 20 nt, Artificial Sequence
  HTT spacer sequence TTCN PAM
agguagcccacaggcuacag

SEQ ID NO: 38953 - RNA, 20 nt, Artificial Sequence
  HTT spacer sequence TTCN PAM
cucgcccugggcacacccuc

SEQ ID NO: 38954 - RNA, 20 nt, Artificial Sequence
  HTT spacer sequence TTCN PAM
uaggaggucacggaggaagc

SEQ ID NO: 38955 - RNA, 20 nt, Artificial Sequence
  HTT spacer sequence TTCN PAM
uccgugaccuccuaggaaga

SEQ ID NO: 38956 - RNA, 20 nt, Artificial Sequence
  HTT spacer sequence TTCN PAM
aaagcugcagggcuuccucc

SEQ ID NO: 38957 - RNA, 20 nt, Artificial Sequence
  HTT spacer sequence TTCN PAM
cagugcugguguagcuuagu

SEQ ID NO: 38958 - RNA, 20 nt, Artificial Sequence
  HTT spacer sequence TTCN PAM
ccuuuggaaacgguuuuuag

SEQ ID NO: 38959 - RNA, 20 nt, Artificial Sequence
  HTT spacer sequence TTCN PAM
aaaggagaacuucccagugc

SEQ ID NO: 38960 - RNA, 20 nt, Artificial Sequence
  HTT spacer sequence TTCN PAM
gcucaugccagccugccuga

SEQ ID NO: 38961 - RNA, 20 nt, Artificial Sequence
  HTT spacer sequence TTCN PAM
uagcggcagaucaggcaggc

SEQ ID NO: 38962 - RNA, 20 nt, Artificial Sequence
  HTT spacer sequence TTCN PAM
cgcacaaguaccugcugcuc

SEQ ID NO: 38963 - RNA, 20 nt, Artificial Sequence
  HTT spacer sequence TTCN PAM
gagcagcagguacuugugcg

SEQ ID NO: 38964 - RNA, 20 nt, Artificial Sequence
  HTT spacer sequence TTCN PAM
gcaauauaccugcguuaaaa

SEQ ID NO: 38965 - RNA, 20 nt, Artificial Sequence
  HTT spacer sequence TTCN PAM
uguuaaugcuggcagaaugc

SEQ ID NO: 38966 - RNA, 20 nt, Artificial Sequence
  HTT spacer sequence TTCN PAM
gccagcauuaacaagaagca

SEQ ID NO: 38967 - RNA, 20 nt, Artificial Sequence
  HTT spacer sequence TTCN PAM
agaggaggagggcauucugc

SEQ ID NO: 38968 - RNA, 20 nt, Artificial Sequence
  HTT spacer sequence TTCN PAM
cccguucaagaggaggaggg

SEQ ID NO: 38969 - RNA, 20 nt, Artificial Sequence
  HTT spacer sequence TTCN PAM
aguguguggaggcacaguca

SEQ ID NO: 38970 - RNA, 20 nt, Artificial Sequence
  HTT spacer sequence TTCN PAM
aggcuuucucugcaauaaac

SEQ ID NO: 38971 - RNA, 20 nt, Artificial Sequence
  HTT spacer sequence TTCN PAM
cugcaauaaaccguggugca

SEQ ID NO: 38972 - RNA, 20 nt, Artificial Sequence
  HTT spacer sequence TTCN PAM
aaacucacuaguguacacaa

SEQ ID NO: 38973 - RNA, 20 nt, Artificial Sequence
  HTT spacer sequence TTCN PAM
ccuagaguuauaaguguuuu

SEQ ID NO: 38974 - RNA, 20 nt, Artificial Sequence
  HTT spacer sequence TTCN PAM
uuuccccuagaguuauaagu

SEQ ID NO: 38975 - RNA, 20 nt, Artificial Sequence
  HTT spacer sequence TTCN PAM
uguacaacuuuucguuuccc

SEQ ID NO: 38976 - RNA, 20 nt, Artificial Sequence
  HTT spacer sequence TTCN PAM
cuuuccuguacaacuuuucg

SEQ ID NO: 38977 - RNA, 20 nt, Artificial Sequence
  HTT spacer sequence TTCN PAM
acacagauaucccguuguua

SEQ ID NO: 38978 - RNA, 20 nt, Artificial Sequence
  HTT spacer sequence TTCN PAM
acaaacggugcuguaacaac

SEQ ID NO: 38979 - RNA, 20 nt, Artificial Sequence
  HTT spacer sequence TTCN PAM
ugaagauggauggccugugg

SEQ ID NO: 38980 - RNA, 20 nt, Artificial Sequence
  HTT spacer sequence TTCN PAM
agaaagaguccaaagccacu

SEQ ID NO: 38981 - RNA, 20 nt, Artificial Sequence
  HTT spacer sequence TTCN PAM
cuuuuuuaggaucugaaauu

SEQ ID NO: 38982 - RNA, 20 nt, Artificial Sequence
  HTT spacer sequence TTCN PAM
uguuaugaaccaaucaaagc

SEQ ID NO: 38983 - RNA, 20 nt, Artificial Sequence
  HTT spacer sequence TTCN PAM
uaacaugaauggggacauuu

SEQ ID NO: 38984 - RNA, 20 nt, Artificial Sequence
  HTT spacer sequence TTCN PAM
aaaaaaucggguuuugguau

SEQ ID NO: 38985 - RNA, 20 nt, Artificial Sequence
  HTT spacer sequence TTCN PAM
gacgcuacauucuggagugu

SEQ ID NO: 38986 - RNA, 20 nt, Artificial Sequence
  HTT spacer sequence TTCN PAM
ggaguguucuacugacacca

SEQ ID NO: 38987 - RNA, 20 nt, Artificial Sequence
  HTT spacer sequence TTCN PAM
acugacaccaucugccagga

SEQ ID NO: 38988 - RNA, 20 nt, Artificial Sequence
  HTT spacer sequence TTCN PAM
aagaauccccaccugugugc

SEQ ID NO: 38989 - RNA, 20 nt, Artificial Sequence
  HTT spacer sequence TTCN PAM
uggaaguguggguccuggca

SEQ ID NO: 38990 - RNA, 20 nt, Artificial Sequence
  HTT spacer sequence TTCN PAM
agagcagacagaugggguca

SEQ ID NO: 38991 - RNA, 20 nt, Artificial Sequence
  HTT spacer sequence TTCN PAM
ccugaccaucaguggccucu

SEQ ID NO: 38992 - RNA, 20 nt, Artificial Sequence
  HTT spacer sequence TTCN PAM
ugccgggcccugcugaccag

SEQ ID NO: 38993 - RNA, 20 nt, Artificial Sequence
  HTT spacer sequence TTCN PAM
gguaucucacuugucucaug

SEQ ID NO: 38994 - RNA, 20 nt, Artificial Sequence
  HTT spacer sequence TTCN PAM
ucagguaucucacuugucuc

SEQ ID NO: 38995 - RNA, 20 nt, Artificial Sequence
  HTT spacer sequence TTCN PAM
ugccaaaucuggcaaacugc

SEQ ID NO: 38996 - RNA, 20 nt, Artificial Sequence
  HTT spacer sequence TTCN PAM
uuuccauauugcuucuugcg

SEQ ID NO: 38997 - RNA, 20 nt, Artificial Sequence
  HTT spacer sequence TTCN PAM
auauugcuucuugcgcaaac

SEQ ID NO: 38998 - RNA, 20 nt, Artificial Sequence
  HTT spacer sequence TTCN PAM
ugcgcaaacagacgaggugg

SEQ ID NO: 38999 - RNA, 20 nt, Artificial Sequence
  HTT spacer sequence TTCN PAM
agggcccugaggcaguccug

SEQ ID NO: 39000 - RNA, 20 nt, Artificial Sequence
  HTT spacer sequence TTCN PAM
gugggagacagaaauaaaau

SEQ ID NO: 39001 - RNA, 20 nt, Artificial Sequence
  HTT spacer sequence TTCN PAM
gucucccacagaagcagcca

SEQ ID NO: 39002 - RNA, 20 nt, Artificial Sequence
  HTT spacer sequence TTCN PAM
caaccaugccagcguuauuu

SEQ ID NO: 39003 - RNA, 20 nt, Artificial Sequence
  HTT spacer sequence TTCN PAM
acguuugaagccaaaugcaa

SEQ ID NO: 39004 - RNA, 20 nt, Artificial Sequence
  HTT spacer sequence TTCN PAM
aacguggaaauaacgcuggc

SEQ ID NO: 39005 - RNA, 20 nt, Artificial Sequence
  HTT spacer sequence TTCN PAM
cucucaaaaauugcauuugg

SEQ ID NO: 39006 - RNA, 20 nt, Artificial Sequence
  HTT spacer sequence TTCN PAM
acacucccuccccuuuuggg

SEQ ID NO: 39007 - RNA, 20 nt, Artificial Sequence
  HTT spacer sequence TTCN PAM
acuccuacagcauggcauug

SEQ ID NO: 39008 - RNA, 20 nt, Artificial Sequence
  HTT spacer sequence TTCN PAM
gcagccucacgagccaaugc

SEQ ID NO: 39009 - RNA, 20 nt, Artificial Sequence
  HTT spacer sequence TTCN PAM
accugcugcaggcuggaagg

SEQ ID NO: 39010 - RNA, 20 nt, Artificial Sequence
  HTT spacer sequence TTCN PAM
agccugcagcagguggaacc

SEQ ID NO: 39011 - RNA, 20 nt, Artificial Sequence
  HTT spacer sequence TTCN PAM
caccacaucagccuuccagc

SEQ ID NO: 39012 - RNA, 20 nt, Artificial Sequence
  HTT spacer sequence TTCN PAM
ccucaggcugcccucccggc

SEQ ID NO: 39013 - RNA, 20 nt, Artificial Sequence
  HTT spacer sequence TTCN PAM
ugccuuucuccucaggcugc

SEQ ID NO: 39014 - RNA, 20 nt, Artificial Sequence
  HTT spacer sequence TTCN PAM
gaauguggugccacugucag

SEQ ID NO: 39015 - RNA, 20 nt, Artificial Sequence
  HTT spacer sequence TTCN PAM
gaagguuuuuccugccuuuc

SEQ ID NO: 39016 - RNA, 20 nt, Artificial Sequence
  HTT spacer sequence TTCN PAM
ccaagaaggagauggccuug

SEQ ID NO: 39017 - RNA, 20 nt, Artificial Sequence
  HTT spacer sequence TTCN PAM
uggggaacuuugcugacagu

SEQ ID NO: 39018 - RNA, 20 nt, Artificial Sequence
  HTT spacer sequence TTCN PAM
uagcaccccacgggcagaga

SEQ ID NO: 39019 - RNA, 20 nt, Artificial Sequence
  HTT spacer sequence TTCN PAM
ccaggcuccacggggcccca

SEQ ID NO: 39020 - RNA, 20 nt, Artificial Sequence
  HTT spacer sequence TTCN PAM
agccagcguagaucaggucu

SEQ ID NO: 39021 - RNA, 20 nt, Artificial Sequence
  HTT spacer sequence TTCN PAM
ccuccuugagggccaaccca

SEQ ID NO: 39022 - RNA, 20 nt, Artificial Sequence
  HTT spacer sequence TTCN PAM
cuuacucacccgugcugcca

SEQ ID NO: 39023 - RNA, 20 nt, Artificial Sequence
  HTT spacer sequence TTCN PAM
uccugacuuggagacccugu

SEQ ID NO: 39024 - RNA, 20 nt, Artificial Sequence
  HTT spacer sequence TTCN PAM
ggggcucuguccucugcgag

SEQ ID NO: 39025 - RNA, 20 nt, Artificial Sequence
  HTT spacer sequence TTCN PAM
aagccgcuccccaggggugc

SEQ ID NO: 39026 - RNA, 20 nt, Artificial Sequence
  HTT spacer sequence TTCN PAM
caggcgcaccugggagcugu

SEQ ID NO: 39027 - RNA, 20 nt, Artificial Sequence
  HTT spacer sequence TTCN PAM
caccugcgaaaggggagcgg

SEQ ID NO: 39028 - RNA, 20 nt, Artificial Sequence
  HTT spacer sequence TTCN PAM
caggugagaacaggguuccc

SEQ ID NO: 39029 - RNA, 20 nt, Artificial Sequence
  HTT spacer sequence TTCN PAM
ccuccccgcuccccuuucgc

SEQ ID NO: 39030 - RNA, 20 nt, Artificial Sequence
  HTT spacer sequence TTCN PAM
uccugcuccuccuccugcag

SEQ ID NO: 39031 - RNA, 20 nt, Artificial Sequence
  HTT spacer sequence TTCN PAM
gccagcuucuagaaccuucc

SEQ ID NO: 39032 - RNA, 20 nt, Artificial Sequence
  HTT spacer sequence TTCN PAM
agaaccuuccccacagugcu

SEQ ID NO: 39033 - RNA, 20 nt, Artificial Sequence
  HTT spacer sequence TTCN PAM
agaagcuggcagaagcccuc

SEQ ID NO: 39034 - RNA, 20 nt, Artificial Sequence
  HTT spacer sequence TTCN PAM
ccacagugcugcacugacca

SEQ ID NO: 39035 - RNA, 20 nt, Artificial Sequence
  HTT spacer sequence TTCN PAM
uuaguuccccgcaggguuag

SEQ ID NO: 39036 - RNA, 20 nt, Artificial Sequence
  HTT spacer sequence TTCN PAM
ccgcaggguuagacuccuga

SEQ ID NO: 39037 - RNA, 20 nt, Artificial Sequence
  HTT spacer sequence TTCN PAM
cuuguuuaauccucagcuca

SEQ ID NO: 39038 - RNA, 20 nt, Artificial Sequence
  HTT spacer sequence TTCN PAM
cgcucggaauuuggauucaa

SEQ ID NO: 39039 - RNA, 20 nt, Artificial Sequence
  HTT spacer sequence TTCN PAM
gagcgugaaugggcucucca

SEQ ID NO: 39040 - RNA, 20 nt, Artificial Sequence
  HTT spacer sequence TTCN PAM
accacggggcugacccccca

SEQ ID NO: 39041 - RNA, 20 nt, Artificial Sequence
  HTT spacer sequence TTCN PAM
aaaacgccuuugucuuuucc

SEQ ID NO: 39042 - RNA, 20 nt, Artificial Sequence
  HTT spacer sequence TTCN PAM
uguucaaagaacuuucaaga

SEQ ID NO: 39043 - RNA, 20 nt, Artificial Sequence
  HTT spacer sequence TTCN PAM
aagaacuuucaagagacuuu

SEQ ID NO: 39044 - RNA, 20 nt, Artificial Sequence
  HTT spacer sequence TTCN PAM
uugaacaggaaaagacaaag

SEQ ID NO: 39045 - RNA, 20 nt, Artificial Sequence
  HTT spacer sequence TTCN PAM
agagacuuuccaaguuuugu

SEQ ID NO: 39046 - RNA, 20 nt, Artificial Sequence
  HTT spacer sequence TTCN PAM
aaguuuuguucgggaacagu

SEQ ID NO: 39047 - RNA, 20 nt, Artificial Sequence
  HTT spacer sequence TTCN PAM
ggaacaguguggcuccccag

SEQ ID NO: 39048 - RNA, 20 nt, Artificial Sequence
  HTT spacer sequence TTCN PAM
cgaacaaaacuuggaaaguc

SEQ ID NO: 39049 - RNA, 20 nt, Artificial Sequence
  HTT spacer sequence TTCN PAM
ugauaauuagaaauaucaac

SEQ ID NO: 39050 - RNA, 20 nt, Artificial Sequence
  HTT spacer sequence TTCN PAM
aauuaucaugaaauuaaaau

SEQ ID NO: 39051 - RNA, 20 nt, Artificial Sequence
  HTT spacer sequence TTCN PAM
aaacuaauggaauuuuaaug

SEQ ID NO: 39052 - RNA, 20 nt, Artificial Sequence
  HTT spacer sequence TTCN PAM
aaggcugagcggcaguugau

SEQ ID NO: 39053 - RNA, 20 nt, Artificial Sequence
  HTT spacer sequence TTCN PAM
auuaguuucgaaggcugagc

SEQ ID NO: 39054 - RNA, 20 nt, Artificial Sequence
  HTT spacer sequence TTCN PAM
uagcuguaaccuaagcagcu

SEQ ID NO: 39055 - RNA, 20 nt, Artificial Sequence
  HTT spacer sequence TTCN PAM
cccagggccugccucccgca

SEQ ID NO: 39056 - RNA, 20 nt, Artificial Sequence
  HTT spacer sequence TTCN PAM
gcagcugccuguaagggaga

SEQ ID NO: 39057 - RNA, 20 nt, Artificial Sequence
  HTT spacer sequence TTCN PAM
cccuuacaggcagcugcuga

SEQ ID NO: 39058 - RNA, 20 nt, Artificial Sequence
  HTT spacer sequence TTCN PAM
auccccaaaaaagccugcug

SEQ ID NO: 39059 - RNA, 20 nt, Artificial Sequence
  HTT spacer sequence TTCN PAM
gcaggcuuuuuuggggauag

SEQ ID NO: 39060 - RNA, 20 nt, Artificial Sequence
  HTT spacer sequence TTCN PAM
aucucaauacaaauuucagc

SEQ ID NO: 39061 - RNA, 20 nt, Artificial Sequence
  HTT spacer sequence TTCN PAM
auuccaucucaauacaaauu

SEQ ID NO: 39062 - RNA, 20 nt, Artificial Sequence
  HTT spacer sequence TTCN PAM
uagucccacuugauaagaac

SEQ ID NO: 39063 - RNA, 20 nt, Artificial Sequence
  HTT spacer sequence TTCN PAM
cacacagauaagaagcuugu

SEQ ID NO: 39064 - RNA, 20 nt, Artificial Sequence
  HTT spacer sequence TTCN PAM
uaucucuaugucuuuuauuu

SEQ ID NO: 39065 - RNA, 20 nt, Artificial Sequence
  HTT spacer sequence TTCN PAM
cuuucuugccuuauuuucug

SEQ ID NO: 39066 - RNA, 20 nt, Artificial Sequence
  HTT spacer sequence TTCN PAM
ugccuuauuuucuggcuaug

SEQ ID NO: 39067 - RNA, 20 nt, Artificial Sequence
  HTT spacer sequence TTCN PAM
ggcuaugagcuccaguacaa

SEQ ID NO: 39068 - RNA, 20 nt, Artificial Sequence
  HTT spacer sequence TTCN PAM
acauuguacuggagcucaua

SEQ ID NO: 39069 - RNA, 20 nt, Artificial Sequence
  HTT spacer sequence TTCN PAM
ugagggucauugggcuguaa

SEQ ID NO: 39070 - RNA, 20 nt, Artificial Sequence
  HTT spacer sequence TTCN PAM
uuuucucuugauguccuugu

SEQ ID NO: 39071 - RNA, 20 nt, Artificial Sequence
  HTT spacer sequence TTCN PAM
cuugauguccuugucagguu

SEQ ID NO: 39072 - RNA, 20 nt, Artificial Sequence
  HTT spacer sequence TTCN PAM
uacaguaagugcaagagugu

SEQ ID NO: 39073 - RNA, 20 nt, Artificial Sequence
  HTT spacer sequence TTCN PAM
aucuuucucuuuuuucugaa

SEQ ID NO: 39074 - RNA, 20 nt, Artificial Sequence
  HTT spacer sequence TTCN PAM
cuuuuuucugaaaaaaauug

SEQ ID NO: 39075 - RNA, 20 nt, Artificial Sequence
  HTT spacer sequence TTCN PAM
gaaaaaaauuguguaaggau

SEQ ID NO: 39076 - RNA, 20 nt, Artificial Sequence
  HTT spacer sequence TTCN PAM
gaaaaaagagaaagauggaa

SEQ ID NO: 39077 - RNA, 20 nt, Artificial Sequence
  HTT spacer sequence TTCN PAM
uccuuaaauauuugaucugu

SEQ ID NO: 39078 - RNA, 20 nt, Artificial Sequence
  HTT spacer sequence TTCN PAM
uuaaauauuugaucuguucc

SEQ ID NO: 39079 - RNA, 20 nt, Artificial Sequence
  HTT spacer sequence TTCN PAM
gugauuuccacucuuauuuu

SEQ ID NO: 39080 - RNA, 20 nt, Artificial Sequence
  HTT spacer sequence TTCN PAM
acucuuauuuuugucauucc

SEQ ID NO: 39081 - RNA, 20 nt, Artificial Sequence
  HTT spacer sequence TTCN PAM
cuuccuucuauuuacuuuag

SEQ ID NO: 39082 - RNA, 20 nt, Artificial Sequence
  HTT spacer sequence TTCN PAM
uucuauuuacuuuagguuua

SEQ ID NO: 39083 - RNA, 20 nt, Artificial Sequence
  HTT spacer sequence TTCN PAM
auuuacuuuagguuuaauuu

SEQ ID NO: 39084 - RNA, 20 nt, Artificial Sequence
  HTT spacer sequence TTCN PAM
agcuucuuaauguggaagcu

SEQ ID NO: 39085 - RNA, 20 nt, Artificial Sequence
  HTT spacer sequence TTCN PAM
uaauguggaagcucagauca

SEQ ID NO: 39086 - RNA, 20 nt, Artificial Sequence
  HTT spacer sequence TTCN PAM
acauuaagaagcuagaaaau

SEQ ID NO: 39087 - RNA, 20 nt, Artificial Sequence
  HTT spacer sequence TTCN PAM
aacuaguuuuuaaauauaaa

SEQ ID NO: 39088 - RNA, 20 nt, Artificial Sequence
  HTT spacer sequence TTCN PAM
uuacuauucaguuaaaaaua

SEQ ID NO: 39089 - RNA, 20 nt, Artificial Sequence
  HTT spacer sequence TTCN PAM
guuaaaaauaauuuucuagu

SEQ ID NO: 39090 - RNA, 20 nt, Artificial Sequence
  HTT spacer sequence TTCN PAM
aguuuucuuugugauaucuu

SEQ ID NO: 39091 - RNA, 20 nt, Artificial Sequence
  HTT spacer sequence TTCN PAM
uugugauaucuuguuugacc

SEQ ID NO: 39092 - RNA, 20 nt, Artificial Sequence
  HTT spacer sequence TTCN PAM
uucuugguaaauguaccaug

SEQ ID NO: 39093 - RNA, 20 nt, Artificial Sequence
  HTT spacer sequence TTCN PAM
ugguaaauguaccaugugcu

SEQ ID NO: 39094 - RNA, 20 nt, Artificial Sequence
  HTT spacer sequence TTCN PAM
agagcacaugguacauuuac

SEQ ID NO: 39095 - RNA, 20 nt, Artificial Sequence
  HTT spacer sequence TTCN PAM
auauguguuaauuagguuag

SEQ ID NO: 39096 - RNA, 20 nt, Artificial Sequence
  HTT spacer sequence TTCN PAM
uuuuuuuuuuuuuuuuuuga

SEQ ID NO: 39097 - RNA, 20 nt, Artificial Sequence
  HTT spacer sequence TTCN PAM
uacugauuauuuugucuggu

SEQ ID NO: 39098 - RNA, 20 nt, Artificial Sequence
  HTT spacer sequence TTCN PAM
caacaauuuauaauagaaua

SEQ ID NO: 39099 - RNA, 20 nt, Artificial Sequence
  HTT spacer sequence TTCN PAM
auuauaaauuguugggaaaa

SEQ ID NO: 39100 - RNA, 20 nt, Artificial Sequence
  HTT spacer sequence TTCN PAM
gauuauuuuucuuuuuuuag

SEQ ID NO: 39101 - RNA, 20 nt, Artificial Sequence
  HTT spacer sequence TTCN PAM
uuuuuuaguucuuacaauuu

SEQ ID NO: 39102 - RNA, 20 nt, Artificial Sequence
  HTT spacer sequence TTCN PAM
uacaauuuuugccucaaaug

SEQ ID NO: 39103 - RNA, 20 nt, Artificial Sequence
  HTT spacer sequence TTCN PAM
aacauuugaggcaaaaauug

SEQ ID NO: 39104 - RNA, 20 nt, Artificial Sequence
  HTT spacer sequence TTCN PAM
uaugguauuuuuccauggua

SEQ ID NO: 39105 - RNA, 20 nt, Artificial Sequence
  HTT spacer sequence TTCN PAM
augguauuucuuuuuuuuuu

SEQ ID NO: 39106 - RNA, 20 nt, Artificial Sequence
  HTT spacer sequence TTCN PAM
uuuuuuuuuuuuguuaauuc

SEQ ID NO: 39107 - RNA, 20 nt, Artificial Sequence
  HTT spacer sequence TTCN PAM
uuuacuuuuaaccuaaacuu

SEQ ID NO: 39108 - RNA, 20 nt, Artificial Sequence
  HTT spacer sequence TTCN PAM
uuaauuuaccucaaucuacu

SEQ ID NO: 39109 - RNA, 20 nt, Artificial Sequence
  HTT spacer sequence TTCN PAM
aaguagauugagguaaauua

SEQ ID NO: 39110 - RNA, 20 nt, Artificial Sequence
  HTT spacer sequence TTCN PAM
acuuauaauuccauuucccu

SEQ ID NO: 39111 - RNA, 20 nt, Artificial Sequence
  HTT spacer sequence TTCN PAM
ugcagcuuuuguuuaucuga

SEQ ID NO: 39112 - RNA, 20 nt, Artificial Sequence
  HTT spacer sequence TTCN PAM
gauaaacaaaagcugcagga

SEQ ID NO: 39113 - RNA, 20 nt, Artificial Sequence
  HTT spacer sequence TTCN PAM
uuuuuuaaggauguguucac

SEQ ID NO: 39114 - RNA, 20 nt, Artificial Sequence
  HTT spacer sequence TTCN PAM
guuugagaaaauuuuggcca

SEQ ID NO: 39115 - RNA, 20 nt, Artificial Sequence
  HTT spacer sequence TTCN PAM
caaacugaauuuaaaaaaau

SEQ ID NO: 39116 - RNA, 20 nt, Artificial Sequence
  HTT spacer sequence TTCN PAM
uuagauucuccccauuuuac

SEQ ID NO: 39117 - RNA, 20 nt, Artificial Sequence
  HTT spacer sequence TTCN PAM
ccccauuuuaccuguacucu

SEQ ID NO: 39118 - RNA, 20 nt, Artificial Sequence
  HTT spacer sequence TTCN PAM
gugcacugcaaaaaaaaaaa

SEQ ID NO: 39119 - RNA, 20 nt, Artificial Sequence
  HTT spacer sequence TTCN PAM
gauaccaugauagugucauu

SEQ ID NO: 39120 - RNA, 20 nt, Artificial Sequence
  HTT spacer sequence TTCN PAM
uaauagcaccagugucuacu

SEQ ID NO: 39121 - RNA, 20 nt, Artificial Sequence
  HTT spacer sequence TTCN PAM
ucauauuucuauuugugauu

SEQ ID NO: 39122 - RNA, 20 nt, Artificial Sequence
  HTT spacer sequence TTCN PAM
uauuucuauuugugauuguu

SEQ ID NO: 39123 - RNA, 20 nt, Artificial Sequence
  HTT spacer sequence TTCN PAM
auuugugauuguuuccagag

SEQ ID NO: 39124 - RNA, 20 nt, Artificial Sequence
  HTT spacer sequence TTCN PAM
agagcuucucacacaugagc

SEQ ID NO: 39125 - RNA, 20 nt, Artificial Sequence
  HTT spacer sequence TTCN PAM
cacacaugagcagagcaguc

SEQ ID NO: 39126 - RNA, 20 nt, Artificial Sequence
  HTT spacer sequence TTCN PAM
cuuacccauugugauagcac

SEQ ID NO: 39127 - RNA, 20 nt, Artificial Sequence
  HTT spacer sequence TTCN PAM
ucuucccuuacccauuguga

SEQ ID NO: 39128 - RNA, 20 nt, Artificial Sequence
  HTT spacer sequence TTCN PAM
aggcuuccucuucccuuacc

SEQ ID NO: 39129 - RNA, 20 nt, Artificial Sequence
  HTT spacer sequence TTCN PAM
gccauguacagcacagaguu

SEQ ID NO: 39130 - RNA, 20 nt, Artificial Sequence
  HTT spacer sequence TTCN PAM
aaagcacauccucacucuug

SEQ ID NO: 39131 - RNA, 20 nt, Artificial Sequence
  HTT spacer sequence TTCN PAM
gcaucuucccaaagauggga

SEQ ID NO: 39132 - RNA, 20 nt, Artificial Sequence
  HTT spacer sequence TTCN PAM
caaagaugggacaucuugac

SEQ ID NO: 39133 - RNA, 20 nt, Artificial Sequence
  HTT spacer sequence TTCN PAM
gagggugauuauaaggucaa

SEQ ID NO: 39134 - RNA, 20 nt, Artificial Sequence
  HTT spacer sequence TTCN PAM
uuugugguucugagggugau

SEQ ID NO: 39135 - RNA, 20 nt, Artificial Sequence
  HTT spacer sequence TTCN PAM
aucuaauugcuuuaacagca

SEQ ID NO: 39136 - RNA, 20 nt, Artificial Sequence
  HTT spacer sequence TTCN PAM
agauguauuagaagaguuaa

SEQ ID NO: 39137 - RNA, 20 nt, Artificial Sequence
  HTT spacer sequence TTCN PAM
aauacaucuugaauacugua

SEQ ID NO: 39138 - RNA, 20 nt, Artificial Sequence
  HTT spacer sequence TTCN PAM
uuuuuuuggggguaagccuu

SEQ ID NO: 39139 - RNA, 20 nt, Artificial Sequence
  HTT spacer sequence TTCN PAM
uuccuuuuuuuggggguaag

SEQ ID NO: 39140 - RNA, 20 nt, Artificial Sequence
  HTT spacer sequence TTCN PAM
uuucuuuccuuuuuuugggg

SEQ ID NO: 39141 - RNA, 20 nt, Artificial Sequence
  HTT spacer sequence TTCN PAM
aauuaaaaaauauaucuaaa

SEQ ID NO: 39142 - RNA, 20 nt, Artificial Sequence
  HTT spacer sequence TTCN PAM
aguaaaaucuaaagaaauca

SEQ ID NO: 39143 - RNA, 20 nt, Artificial Sequence
  HTT spacer sequence TTCN PAM
uuagauuuuacuagaaugcu

SEQ ID NO: 39144 - RNA, 20 nt, Artificial Sequence
  HTT spacer sequence TTCN PAM
gauuucuuuagauuuuacua

SEQ ID NO: 39145 - RNA, 20 nt, Artificial Sequence
  HTT spacer sequence TTCN PAM
uuguucugauuucuuuagau

SEQ ID NO: 39146 - RNA, 20 nt, Artificial Sequence
  HTT spacer sequence TTCN PAM
uuucuuuguucugauuucuu

SEQ ID NO: 39147 - RNA, 20 nt, Artificial Sequence
  HTT spacer sequence TTCN PAM
auacagauuauuuucugcca

SEQ ID NO: 39148 - RNA, 20 nt, Artificial Sequence
  HTT spacer sequence TTCN PAM
gccauuuuagauuaaggaau

SEQ ID NO: 39149 - RNA, 20 nt, Artificial Sequence
  HTT spacer sequence TTCN PAM
uuaaucuaaaauggcagaaa

SEQ ID NO: 39150 - RNA, 20 nt, Artificial Sequence
  HTT spacer sequence TTCN PAM
auugagauuauuccuuaauc

SEQ ID NO: 39151 - RNA, 20 nt, Artificial Sequence
  HTT spacer sequence TTCN PAM
caucucucuucaauugagau

SEQ ID NO: 39152 - RNA, 20 nt, Artificial Sequence
  HTT spacer sequence TTCN PAM
gguacuuuaaaaauaauauc

SEQ ID NO: 39153 - RNA, 20 nt, Artificial Sequence
  HTT spacer sequence TTCN PAM
uucaaauuugccagugcuga

SEQ ID NO: 39154 - RNA, 20 nt, Artificial Sequence
  HTT spacer sequence TTCN PAM
aaagcccuucuuucaaauuu

SEQ ID NO: 39155 - RNA, 20 nt, Artificial Sequence
  HTT spacer sequence TTCN PAM
uacaguauuucuaaagcccu

SEQ ID NO: 39156 - RNA, 20 nt, Artificial Sequence
  HTT spacer sequence TTCN PAM
ccaucucuuaaagcaacacc

SEQ ID NO: 39157 - RNA, 20 nt, Artificial Sequence
  HTT spacer sequence TTCN PAM
ucacaaaaaucacugugaug

SEQ ID NO: 39158 - RNA, 20 nt, Artificial Sequence
  HTT spacer sequence TTCN PAM
uaaauuucaucacaaaaauc

SEQ ID NO: 39159 - RNA, 20 nt, Artificial Sequence
  HTT spacer sequence TTCN PAM
aagaccagccuggccaacau

SEQ ID NO: 39160 - RNA, 20 nt, Artificial Sequence
  HTT spacer sequence TTCN PAM
ccauguuggccaggcugguc

SEQ ID NO: 39161 - RNA, 20 nt, Artificial Sequence
  HTT spacer sequence TTCN PAM
acuaaaaauacaaaaacuag

SEQ ID NO: 39162 - RNA, 20 nt, Artificial Sequence
  HTT spacer sequence TTCN PAM
guucacucuguuguuccugu

SEQ ID NO: 39163 - RNA, 20 nt, Artificial Sequence
  HTT spacer sequence TTCN PAM
cuggacucaaaucccaaacu

SEQ ID NO: 39164 - RNA, 20 nt, Artificial Sequence
  HTT spacer sequence TTCN PAM
cuuagaagaaaaucaacacu

SEQ ID NO: 39165 - RNA, 20 nt, Artificial Sequence
  HTT spacer sequence TTCN PAM
aagagaaacguauuuucacu

SEQ ID NO: 39166 - RNA, 20 nt, Artificial Sequence
  HTT spacer sequence TTCN PAM
ucuaagagaaacguauuuuc

SEQ ID NO: 39167 - RNA, 20 nt, Artificial Sequence
  HTT spacer sequence TTCN PAM
cagauaaagauaauagaauc

SEQ ID NO: 39168 - RNA, 20 nt, Artificial Sequence
  HTT spacer sequence TTCN PAM
aagccuaugcagugaaauuu

SEQ ID NO: 39169 - RNA, 20 nt, Artificial Sequence
  HTT spacer sequence TTCN PAM
gccauauccaauccacuucu

SEQ ID NO: 39170 - RNA, 20 nt, Artificial Sequence
  HTT spacer sequence TTCN PAM
uuucagccauauccaaucca

SEQ ID NO: 39171 - RNA, 20 nt, Artificial Sequence
  HTT spacer sequence TTCN PAM
cugauuuucuuuucagccau

SEQ ID NO: 39172 - RNA, 20 nt, Artificial Sequence
  HTT spacer sequence TTCN PAM
aauucacugauuuucuuuuc

SEQ ID NO: 39173 - RNA, 20 nt, Artificial Sequence
  HTT spacer sequence TTCN PAM
auugcuguaucuucaaauuc

SEQ ID NO: 39174 - RNA, 20 nt, Artificial Sequence
  HTT spacer sequence TTCN PAM
gacugggccauuucuauugc

SEQ ID NO: 39175 - RNA, 20 nt, Artificial Sequence
  HTT spacer sequence TTCN PAM
ugcugcugcaaucauuuuua

SEQ ID NO: 39176 - RNA, 20 nt, Artificial Sequence
  HTT spacer sequence TTCN PAM
accauuuuuucuaccucauu

SEQ ID NO: 39177 - RNA, 20 nt, Artificial Sequence
  HTT spacer sequence TTCN PAM
ucaaccauuuuuucuaccuc

SEQ ID NO: 39178 - RNA, 20 nt, Artificial Sequence
  HTT spacer sequence TTCN PAM
aaaauguggugaaaaacaua

SEQ ID NO: 39179 - RNA, 20 nt, Artificial Sequence
  HTT spacer sequence TTCN PAM
ccacauuuuggaaaucuguc

SEQ ID NO: 39180 - RNA, 20 nt, Artificial Sequence
  HTT spacer sequence TTCN PAM
uggauguuuaguuuauguuu

SEQ ID NO: 39181 - RNA, 20 nt, Artificial Sequence
  HTT spacer sequence TTCN PAM
aauaauccugugugggguuu

SEQ ID NO: 39182 - RNA, 20 nt, Artificial Sequence
  HTT spacer sequence TTCN PAM
gggugcgauuuucuaauaau

SEQ ID NO: 39183 - RNA, 20 nt, Artificial Sequence
  HTT spacer sequence TTCN PAM
cuuucuguuuggauuucggc

SEQ ID NO: 39184 - RNA, 20 nt, Artificial Sequence
  HTT spacer sequence TTCN PAM
agauuuuucucuuucuguuu

SEQ ID NO: 39185 - RNA, 20 nt, Artificial Sequence
  HTT spacer sequence TTCN PAM
ggcuauuuucaagauuuuuc

SEQ ID NO: 39186 - RNA, 20 nt, Artificial Sequence
  HTT spacer sequence TTCN PAM
uguaaggucauuguuucugg

SEQ ID NO: 39187 - RNA, 20 nt, Artificial Sequence
  HTT spacer sequence TTCN PAM
uuucauguaaggucauuguu

SEQ ID NO: 39188 - RNA, 20 nt, Artificial Sequence
  HTT spacer sequence TTCN PAM
ucagaaauaauaguggucag

SEQ ID NO: 39189 - RNA, 20 nt, Artificial Sequence
  HTT spacer sequence TTCN PAM
gaugaaaagucagccaaaau

SEQ ID NO: 39190 - RNA, 20 nt, Artificial Sequence
  HTT spacer sequence TTCN PAM
uucccugagccucggcggcc

SEQ ID NO: 39191 - RNA, 20 nt, Artificial Sequence
  HTT spacer sequence TTCN PAM
cugagccucggcggcccaua

SEQ ID NO: 39192 - RNA, 20 nt, Artificial Sequence
  HTT spacer sequence TTCN PAM
gccagcccagcagauugcuc

SEQ ID NO: 39193 - RNA, 20 nt, Artificial Sequence
  HTT spacer sequence TTCN PAM
cauuggccagggugagcugg

SEQ ID NO: 39194 - RNA, 20 nt, Artificial Sequence
  HTT spacer sequence TTCN PAM
gcccuccccuccagggcauc

SEQ ID NO: 39195 - RNA, 20 nt, Artificial Sequence
  HTT spacer sequence TTCN PAM
cccccacacccgcccuucag

SEQ ID NO: 39196 - RNA, 20 nt, Artificial Sequence
  HTT spacer sequence TTCN PAM
uaaugucgcccagcggggcg

SEQ ID NO: 39197 - RNA, 20 nt, Artificial Sequence
  HTT spacer sequence TTCN PAM
gugagggccggcacgguggu

SEQ ID NO: 39198 - RNA, 20 nt, Artificial Sequence
  HTT spacer sequence TTCN PAM
cagacucaagccauccuccu

SEQ ID NO: 39199 - RNA, 20 nt, Artificial Sequence
  HTT spacer sequence TTCN PAM
ucgggccgccagggccaggg

SEQ ID NO: 39200 - RNA, 20 nt, Artificial Sequence
  HTT spacer sequence TTCN PAM
guguaggaauaauauggucu

SEQ ID NO: 39201 - RNA, 20 nt, Artificial Sequence
  HTT spacer sequence TTCN PAM
uacacagaacuuccucgggc

SEQ ID NO: 39202 - RNA, 20 nt, Artificial Sequence
  HTT spacer sequence TTCN PAM
gguuaaaaacauuaugcuuc

SEQ ID NO: 39203 - RNA, 20 nt, Artificial Sequence
  HTT spacer sequence TTCN PAM
uuuaauuuauuucaucugcu

SEQ ID NO: 39204 - RNA, 20 nt, Artificial Sequence
  HTT spacer sequence TTCN PAM
ucugcucacugauggugaau

SEQ ID NO: 39205 - RNA, 20 nt, Artificial Sequence
  HTT spacer sequence TTCN PAM
ccaucagugagcagaugaaa

SEQ ID NO: 39206 - RNA, 20 nt, Artificial Sequence
  HTT spacer sequence TTCN PAM
acaacacgggcacaggaggc

SEQ ID NO: 39207 - RNA, 20 nt, Artificial Sequence
  HTT spacer sequence TTCN PAM
cuguguugcccaggcugguc

SEQ ID NO: 39208 - RNA, 20 nt, Artificial Sequence
  HTT spacer sequence TTCN PAM
aaagagcugggauuacaggc

SEQ ID NO: 39209 - RNA, 20 nt, Artificial Sequence
  HTT spacer sequence TTCN PAM
uuuguuaauuaaaaauauau

SEQ ID NO: 39210 - RNA, 20 nt, Artificial Sequence
  HTT spacer sequence TTCN PAM
uucuggcuuggcgcugcucu

SEQ ID NO: 39211 - RNA, 20 nt, Artificial Sequence
  HTT spacer sequence TTCN PAM
ggcuuggcgcugcucuggaa

SEQ ID NO: 39212 - RNA, 20 nt, Artificial Sequence
  HTT spacer sequence TTCN PAM
agagcagcgccaagccagaa

SEQ ID NO: 39213 - RNA, 20 nt, Artificial Sequence
  HTT spacer sequence TTCN PAM
accaucugcgcauaggcagg

SEQ ID NO: 39214 - RNA, 20 nt, Artificial Sequence
  HTT spacer sequence TTCN PAM
cucugucaccuaggcuggag

SEQ ID NO: 39215 - RNA, 20 nt, Artificial Sequence
  HTT spacer sequence TTCN PAM
cucccgccgcguuuuucccu

SEQ ID NO: 39216 - RNA, 20 nt, Artificial Sequence
  HTT spacer sequence TTCN PAM
ccucauucucucccgccgcg

SEQ ID NO: 39217 - RNA, 20 nt, Artificial Sequence
  HTT spacer sequence TTCN PAM
ugccuuccccucauucucuc

SEQ ID NO: 39218 - RNA, 20 nt, Artificial Sequence
  HTT spacer sequence TTCN PAM
uuccugccuuccccucauuc

SEQ ID NO: 39219 - RNA, 20 nt, Artificial Sequence
  HTT spacer sequence TTCN PAM
ccggcgcugggucucccugc

SEQ ID NO: 39220 - RNA, 20 nt, Artificial Sequence
  HTT spacer sequence TTCN PAM
uuccccggcgcugggucucc

SEQ ID NO: 39221 - RNA, 20 nt, Artificial Sequence
  HTT spacer sequence TTCN PAM
gcccgcgccaccgcccgcgc

SEQ ID NO: 39222 - RNA, 20 nt, Artificial Sequence
  HTT spacer sequence TTCN PAM
cucgucggacuccacgagcg

SEQ ID NO: 39223 - RNA, 20 nt, Artificial Sequence
  HTT spacer sequence TTCN PAM
gcccuaacaaagcggccgcu

SEQ ID NO: 39224 - RNA, 20 nt, Artificial Sequence
  HTT spacer sequence TTCN PAM
gagacccgaacuccagacgc

SEQ ID NO: 39225 - RNA, 20 nt, Artificial Sequence
  HTT spacer sequence TTCN PAM
ggucucggaaggcagcuucu

SEQ ID NO: 39226 - RNA, 20 nt, Artificial Sequence
  HTT spacer sequence TTCN PAM
cagcaagugaccaagcaggu

SEQ ID NO: 39227 - RNA, 20 nt, Artificial Sequence
  HTT spacer sequence TTCN PAM
cugugccugaguuuccucau

SEQ ID NO: 39228 - RNA, 20 nt, Artificial Sequence
  HTT spacer sequence TTCN PAM
ucauuggaccugucuuugga

SEQ ID NO: 39229 - RNA, 20 nt, Artificial Sequence
  HTT spacer sequence TTCN PAM
uaaaacugcaaguccagccu

SEQ ID NO: 39230 - RNA, 20 nt, Artificial Sequence
  HTT spacer sequence TTCN PAM
uccgcccuugucuuugucaa

SEQ ID NO: 39231 - RNA, 20 nt, Artificial Sequence
  HTT spacer sequence TTCN PAM
cuccucuuugcagugccugu

SEQ ID NO: 39232 - RNA, 20 nt, Artificial Sequence
  HTT spacer sequence TTCN PAM
gcccuguuuaggaugagggu

SEQ ID NO: 39233 - RNA, 20 nt, Artificial Sequence
  HTT spacer sequence TTCN PAM
aauaaaauguaaaauggucu

SEQ ID NO: 39234 - RNA, 20 nt, Artificial Sequence
  HTT spacer sequence TTCN PAM
accaaauucaaauaaaaugu

SEQ ID NO: 39235 - RNA, 20 nt, Artificial Sequence
  HTT spacer sequence TTCN PAM
uagaaacauuucccuuccca

SEQ ID NO: 39236 - RNA, 20 nt, Artificial Sequence
  HTT spacer sequence TTCN PAM
aggaauuccaccaaauucaa

SEQ ID NO: 39237 - RNA, 20 nt, Artificial Sequence
  HTT spacer sequence TTCN PAM
cuucccaguuguaugaguuu

SEQ ID NO: 39238 - RNA, 20 nt, Artificial Sequence
  HTT spacer sequence TTCN PAM
caguuguaugaguuuccuau

SEQ ID NO: 39239 - RNA, 20 nt, Artificial Sequence
  HTT spacer sequence TTCN PAM
uauugcuguguaacaaagca

SEQ ID NO: 39240 - RNA, 20 nt, Artificial Sequence
  HTT spacer sequence TTCN PAM
gccacuaagugaguggugcu

SEQ ID NO: 39241 - RNA, 20 nt, Artificial Sequence
  HTT spacer sequence TTCN PAM
gcccaacuagggcaaauaaa

SEQ ID NO: 39242 - RNA, 20 nt, Artificial Sequence
  HTT spacer sequence TTCN PAM
uagguaucaaaagaguagga

SEQ ID NO: 39243 - RNA, 20 nt, Artificial Sequence
  HTT spacer sequence TTCN PAM
aaaucaaggaccaaaaaaaa

SEQ ID NO: 39244 - RNA, 20 nt, Artificial Sequence
  HTT spacer sequence TTCN PAM
gaauuuugaaaauguugcuu

SEQ ID NO: 39245 - RNA, 20 nt, Artificial Sequence
  HTT spacer sequence TTCN PAM
gaaaaaaucauugucuaaaa

SEQ ID NO: 39246 - RNA, 20 nt, Artificial Sequence
  HTT spacer sequence TTCN PAM
aaauuccgaaaaaaucauug

SEQ ID NO: 39247 - RNA, 20 nt, Artificial Sequence
  HTT spacer sequence TTCN PAM
aaccagacacaagacacaaa

SEQ ID NO: 39248 - RNA, 20 nt, Artificial Sequence
  HTT spacer sequence TTCN PAM
cacauccucccacgcugcua

SEQ ID NO: 39249 - RNA, 20 nt, Artificial Sequence
  HTT spacer sequence TTCN PAM
ggggauugggcccugguauc

SEQ ID NO: 39250 - RNA, 20 nt, Artificial Sequence
  HTT spacer sequence TTCN PAM
ggccccaggagccuccccgg

SEQ ID NO: 39251 - RNA, 20 nt, Artificial Sequence
  HTT spacer sequence TTCN PAM
guuugugguuuuuaaaucug

SEQ ID NO: 39252 - RNA, 20 nt, Artificial Sequence
  HTT spacer sequence TTCN PAM
cuuuuuaucucuacuugaua

SEQ ID NO: 39253 - RNA, 20 nt, Artificial Sequence
  HTT spacer sequence TTCN PAM
uaaucccugcccaagcaccu

SEQ ID NO: 39254 - RNA, 20 nt, Artificial Sequence
  HTT spacer sequence TTCN PAM
ccacuuccuaaucccugccc

SEQ ID NO: 39255 - RNA, 20 nt, Artificial Sequence
  HTT spacer sequence TTCN PAM
aacagcgauauuagcgaccc

SEQ ID NO: 39256 - RNA, 20 nt, Artificial Sequence
  HTT spacer sequence TTCN PAM
uugucacgugggcggcuucc

SEQ ID NO: 39257 - RNA, 20 nt, Artificial Sequence
  HTT spacer sequence TTCN PAM
aggugcuuuuuuggaggcuu

SEQ ID NO: 39258 - RNA, 20 nt, Artificial Sequence
  HTT spacer sequence TTCN PAM
uccuagcuccucauuuuagg

SEQ ID NO: 39259 - RNA, 20 nt, Artificial Sequence
  HTT spacer sequence TTCN PAM
uagcuccucauuuuaggcaa

SEQ ID NO: 39260 - RNA, 20 nt, Artificial Sequence
  HTT spacer sequence TTCN PAM
gcuuauaguuuaauuuuuuu

SEQ ID NO: 39261 - RNA, 20 nt, Artificial Sequence
  HTT spacer sequence TTCN PAM
ccggacaucaggaccaucuc

SEQ ID NO: 39262 - RNA, 20 nt, Artificial Sequence
  HTT spacer sequence TTCN PAM
gccgaaaucagagcaauuua

SEQ ID NO: 39263 - RNA, 20 nt, Artificial Sequence
  HTT spacer sequence TTCN PAM
gcagaauauuccccggacau

SEQ ID NO: 39264 - RNA, 20 nt, Artificial Sequence
  HTT spacer sequence TTCN PAM
ggcaauuuaaauugcucuga

SEQ ID NO: 39265 - RNA, 20 nt, Artificial Sequence
  HTT spacer sequence TTCN PAM
ccuccuucuggcaauuuaaa

SEQ ID NO: 39266 - RNA, 20 nt, Artificial Sequence
  HTT spacer sequence TTCN PAM
aaggaagacaagcugaaaca

SEQ ID NO: 39267 - RNA, 20 nt, Artificial Sequence
  HTT spacer sequence TTCN PAM
uuggaaccugugguugcccu

SEQ ID NO: 39268 - RNA, 20 nt, Artificial Sequence
  HTT spacer sequence TTCN PAM
gcuugucuuccuuggaaccu

SEQ ID NO: 39269 - RNA, 20 nt, Artificial Sequence
  HTT spacer sequence TTCN PAM
caacacaaucacuuacugua

SEQ ID NO: 39270 - RNA, 20 nt, Artificial Sequence
  HTT spacer sequence TTCN PAM
gcaagacucuuuaaagauca

SEQ ID NO: 39271 - RNA, 20 nt, Artificial Sequence
  HTT spacer sequence TTCN PAM
ccaccacucacugguauuag

SEQ ID NO: 39272 - RNA, 20 nt, Artificial Sequence
  HTT spacer sequence TTCN PAM
uuuuucuuucuuagggcacu

SEQ ID NO: 39273 - RNA, 20 nt, Artificial Sequence
  HTT spacer sequence TTCN PAM
uucuuagggcacuguuugaa

SEQ ID NO: 39274 - RNA, 20 nt, Artificial Sequence
  HTT spacer sequence TTCN PAM
uagggcacuguuugaagaag

SEQ ID NO: 39275 - RNA, 20 nt, Artificial Sequence
  HTT spacer sequence TTCN PAM
aacagugcccuaagaaagaa

SEQ ID NO: 39276 - RNA, 20 nt, Artificial Sequence
  HTT spacer sequence TTCN PAM
ucaaacagugcccuaagaaa

SEQ ID NO: 39277 - RNA, 20 nt, Artificial Sequence
  HTT spacer sequence TTCN PAM
aagaccaagagcacgucuca

SEQ ID NO: 39278 - RNA, 20 nt, Artificial Sequence
  HTT spacer sequence TTCN PAM
gaugagcuuccaagaccaag

SEQ ID NO: 39279 - RNA, 20 nt, Artificial Sequence
  HTT spacer sequence TTCN PAM
cgcuuucgggacaggcaccc

SEQ ID NO: 39280 - RNA, 20 nt, Artificial Sequence
  HTT spacer sequence TTCN PAM
ggacaggcacccugugugcu

SEQ ID NO: 39281 - RNA, 20 nt, Artificial Sequence
  HTT spacer sequence TTCN PAM
ugggccuccgagcuggagac

SEQ ID NO: 39282 - RNA, 20 nt, Artificial Sequence
  HTT spacer sequence TTCN PAM
uugacagcaaguaucugguc

SEQ ID NO: 39283 - RNA, 20 nt, Artificial Sequence
  HTT spacer sequence TTCN PAM
cguugauuucauugacagca

SEQ ID NO: 39284 - RNA, 20 nt, Artificial Sequence
  HTT spacer sequence TTCN PAM
ugagaugcuuuuuucacguu

SEQ ID NO: 39285 - RNA, 20 nt, Artificial Sequence
  HTT spacer sequence TTCN PAM
cuacaucuucaugagaugcu

SEQ ID NO: 39286 - RNA, 20 nt, Artificial Sequence
  HTT spacer sequence TTCN PAM
caauuaauuucacuacaucu

SEQ ID NO: 39287 - RNA, 20 nt, Artificial Sequence
  HTT spacer sequence TTCN PAM
cauggugauugcugaaggcg

SEQ ID NO: 39288 - RNA, 20 nt, Artificial Sequence
  HTT spacer sequence TTCN PAM
gcaaucaccaugugaaggac

SEQ ID NO: 39289 - RNA, 20 nt, Artificial Sequence
  HTT spacer sequence TTCN PAM
aauccuguuccagugaugaa

SEQ ID NO: 39290 - RNA, 20 nt, Artificial Sequence
  HTT spacer sequence TTCN PAM
aagcggccgacgccuucagc

SEQ ID NO: 39291 - RNA, 20 nt, Artificial Sequence
  HTT spacer sequence TTCN PAM
agugaugaagaagggggacu

SEQ ID NO: 39292 - RNA, 20 nt, Artificial Sequence
  HTT spacer sequence TTCN PAM
ucacuggaacaggauucgaa

SEQ ID NO: 39293 - RNA, 20 nt, Artificial Sequence
  HTT spacer sequence TTCN PAM
ucaucacuggaacaggauuc

SEQ ID NO: 39294 - RNA, 20 nt, Artificial Sequence
  HTT spacer sequence TTCN PAM
uagagucccccuucuucauc

SEQ ID NO: 39295 - RNA, 20 nt, Artificial Sequence
  HTT spacer sequence TTCN PAM
uucauagagucccccuucuu

SEQ ID NO: 39296 - RNA, 20 nt, Artificial Sequence
  HTT spacer sequence TTCN PAM
gccagccuuuuccuucauag

SEQ ID NO: 39297 - RNA, 20 nt, Artificial Sequence
  HTT spacer sequence TTCN PAM
aaagcacuagguauaaacag

SEQ ID NO: 39298 - RNA, 20 nt, Artificial Sequence
  HTT spacer sequence TTCN PAM
uccacgacucgcucugcucu

SEQ ID NO: 39299 - RNA, 20 nt, Artificial Sequence
  HTT spacer sequence TTCN PAM
accagacugcauuuccucca

SEQ ID NO: 39300 - RNA, 20 nt, Artificial Sequence
  HTT spacer sequence TTCN PAM
auaugauuuuugaaaacccg

SEQ ID NO: 39301 - RNA, 20 nt, Artificial Sequence
  HTT spacer sequence TTCN PAM
aaaaucauauugaaaauucc

SEQ ID NO: 39302 - RNA, 20 nt, Artificial Sequence
  HTT spacer sequence TTCN PAM
gagcccuugaaauugaaaca

SEQ ID NO: 39303 - RNA, 20 nt, Artificial Sequence
  HTT spacer sequence TTCN PAM
agggcucugaauugcucgca

SEQ ID NO: 39304 - RNA, 20 nt, Artificial Sequence
  HTT spacer sequence TTCN PAM
auuucaagggcucugaauug

SEQ ID NO: 39305 - RNA, 20 nt, Artificial Sequence
  HTT spacer sequence TTCN PAM
gagucggccgcaacucgauu

SEQ ID NO: 39306 - RNA, 20 nt, Artificial Sequence
  HTT spacer sequence TTCN PAM
uguccaacaucaaaucgagu

SEQ ID NO: 39307 - RNA, 20 nt, Artificial Sequence
  HTT spacer sequence TTCN PAM
aaggaggaaauaucaaaagu

SEQ ID NO: 39308 - RNA, 20 nt, Artificial Sequence
  HTT spacer sequence TTCN PAM
uccuuagaaagcauguuggg

SEQ ID NO: 39309 - RNA, 20 nt, Artificial Sequence
  HTT spacer sequence TTCN PAM
ugaugauucgguuuucagca

SEQ ID NO: 39310 - RNA, 20 nt, Artificial Sequence
  HTT spacer sequence TTCN PAM
guuuucagcauuggacuaga

SEQ ID NO: 39311 - RNA, 20 nt, Artificial Sequence
  HTT spacer sequence TTCN PAM
gcauuggacuagaaagucau

SEQ ID NO: 39312 - RNA, 20 nt, Artificial Sequence
  HTT spacer sequence TTCN PAM
aguccaaugcugaaaaccga

SEQ ID NO: 39313 - RNA, 20 nt, Artificial Sequence
  HTT spacer sequence TTCN PAM
uuccacgagcuccaaccugg

SEQ ID NO: 39314 - RNA, 20 nt, Artificial Sequence
  HTT spacer sequence TTCN PAM
acgagcuccaaccuggaguc

SEQ ID NO: 39315 - RNA, 20 nt, Artificial Sequence
  HTT spacer sequence TTCN PAM
gcucugcccgcaggcgccgc

SEQ ID NO: 39316 - RNA, 20 nt, Artificial Sequence
  HTT spacer sequence TTCN PAM
uggucaccagcgaguggauu

SEQ ID NO: 39317 - RNA, 20 nt, Artificial Sequence
  HTT spacer sequence TTCN PAM
cggccggguacucggccacg

SEQ ID NO: 39318 - RNA, 20 nt, Artificial Sequence
  HTT spacer sequence TTCN PAM
gcgccgugugcccggacgac

SEQ ID NO: 39319 - RNA, 20 nt, Artificial Sequence
  HTT spacer sequence TTCN PAM
gguugguuaccaugcagacg

SEQ ID NO: 39320 - RNA, 20 nt, Artificial Sequence
  HTT spacer sequence TTCN PAM
ucugcaugguaaccaacccg

SEQ ID NO: 39321 - RNA, 20 nt, Artificial Sequence
  HTT spacer sequence TTCN PAM
ugccacguguucauggugga

SEQ ID NO: 39322 - RNA, 20 nt, Artificial Sequence
  HTT spacer sequence TTCN PAM
ugguggacccagacuuguuu

SEQ ID NO: 39323 - RNA, 20 nt, Artificial Sequence
  HTT spacer sequence TTCN PAM
agacagccauuggugucugg

SEQ ID NO: 39324 - RNA, 20 nt, Artificial Sequence
  HTT spacer sequence TTCN PAM
cggcguccucccuccccguc

SEQ ID NO: 39325 - RNA, 20 nt, Artificial Sequence
  HTT spacer sequence TTCN PAM
ucucuguccuguaccgagac

SEQ ID NO: 39326 - RNA, 20 nt, Artificial Sequence
  HTT spacer sequence TTCN PAM
ggacggggacgccgaugccc

SEQ ID NO: 39327 - RNA, 20 nt, Artificial Sequence
  HTT spacer sequence TTCN PAM
ggugggcaucggcguccccg

SEQ ID NO: 39328 - RNA, 20 nt, Artificial Sequence
  HTT spacer sequence TTCN PAM
caaugccgcugucacuguug

SEQ ID NO: 39329 - RNA, 20 nt, Artificial Sequence
  HTT spacer sequence TTCN PAM
accaggaggagaagagcaac

SEQ ID NO: 39330 - RNA, 20 nt, Artificial Sequence
  HTT spacer sequence TTCN PAM
ccuccugguggaaguuccca

SEQ ID NO: 39331 - RNA, 20 nt, Artificial Sequence
  HTT spacer sequence TTCN PAM
guccggaccccgaagggagc

SEQ ID NO: 39332 - RNA, 20 nt, Artificial Sequence
  HTT spacer sequence TTCN PAM
ggguccggacagaagggccc

SEQ ID NO: 39333 - RNA, 20 nt, Artificial Sequence
  HTT spacer sequence TTCN PAM
gggaccuaaacaagcaccua

SEQ ID NO: 39334 - RNA, 20 nt, Artificial Sequence
  HTT spacer sequence TTCN PAM
uugaggagcucagucccccc

SEQ ID NO: 39335 - RNA, 20 nt, Artificial Sequence
  HTT spacer sequence TTCN PAM
aagaggggcaccgugggugc

SEQ ID NO: 39336 - RNA, 20 nt, Artificial Sequence
  HTT spacer sequence TTCN PAM
accagcgcuggcucccgguc

SEQ ID NO: 39337 - RNA, 20 nt, Artificial Sequence
  HTT spacer sequence TTCN PAM
accgauggcugguccagcau

SEQ ID NO: 39338 - RNA, 20 nt, Artificial Sequence
  HTT spacer sequence TTCN PAM
cgcagcccccgcugaaugcc

SEQ ID NO: 39339 - RNA, 20 nt, Artificial Sequence
  HTT spacer sequence TTCN PAM
gcgggggcugcgcgaagcug

SEQ ID NO: 39340 - RNA, 20 nt, Artificial Sequence
  HTT spacer sequence TTCN PAM
gggcauucagcgggggcugc

SEQ ID NO: 39341 - RNA, 20 nt, Artificial Sequence
  HTT spacer sequence TTCN PAM
uggaccacucccucuucggg

SEQ ID NO: 39342 - RNA, 20 nt, Artificial Sequence
  HTT spacer sequence TTCN PAM
aaaggccuuccuggaccacu

SEQ ID NO: 39343 - RNA, 20 nt, Artificial Sequence
  HTT spacer sequence TTCN PAM
auggggaccaaaaaugcuuu

SEQ ID NO: 39344 - RNA, 20 nt, Artificial Sequence
  HTT spacer sequence TTCN PAM
aaagacuaaggaagauaaaa

SEQ ID NO: 39345 - RNA, 20 nt, Artificial Sequence
  HTT spacer sequence TTCN PAM
aacauuucgauggggaccaa

SEQ ID NO: 39346 - RNA, 20 nt, Artificial Sequence
  HTT spacer sequence TTCN PAM
uuagucuuucgaacauuucg

SEQ ID NO: 39347 - RNA, 20 nt, Artificial Sequence
  HTT spacer sequence TTCN PAM
cugcacccaaccgcacaggc

SEQ ID NO: 39348 - RNA, 20 nt, Artificial Sequence
  HTT spacer sequence TTCN PAM
agaggguucccugcacccaa

SEQ ID NO: 39349 - RNA, 20 nt, Artificial Sequence
  HTT spacer sequence TTCN PAM
cauccugagaccauccuaag

SEQ ID NO: 39350 - RNA, 20 nt, Artificial Sequence
  HTT spacer sequence TTCN PAM
uaggauggucucaggaugug

SEQ ID NO: 39351 - RNA, 20 nt, Artificial Sequence
  HTT spacer sequence TTCN PAM
gcugcucuaacuggggaggc

SEQ ID NO: 39352 - RNA, 20 nt, Artificial Sequence
  HTT spacer sequence TTCN PAM
aggggucaugaggcggccac

SEQ ID NO: 39353 - RNA, 20 nt, Artificial Sequence
  HTT spacer sequence TTCN PAM
cccuccucuggggaggagca

SEQ ID NO: 39354 - RNA, 20 nt, Artificial Sequence
  HTT spacer sequence TTCN PAM
uugcuccuccccagaggagg

SEQ ID NO: 39355 - RNA, 20 nt, Artificial Sequence
  HTT spacer sequence TTCN PAM
uaaaauuuccauacaaugga

SEQ ID NO: 39356 - RNA, 20 nt, Artificial Sequence
  HTT spacer sequence TTCN PAM
auacaauggauuuuggaaau

SEQ ID NO: 39357 - RNA, 20 nt, Artificial Sequence
  HTT spacer sequence TTCN PAM
aaaauccauuguauggaaau

SEQ ID NO: 39358 - RNA, 20 nt, Artificial Sequence
  HTT spacer sequence TTCN PAM
uuuuuaaaauuuccaaaauc

SEQ ID NO: 39359 - RNA, 20 nt, Artificial Sequence
  HTT spacer sequence TTCN PAM
aaauuacaccaaucaauccu

SEQ ID NO: 39360 - RNA, 20 nt, Artificial Sequence
  HTT spacer sequence TTCN PAM
uuucaaaauuacaccaauca

SEQ ID NO: 39361 - RNA, 20 nt, Artificial Sequence
  HTT spacer sequence TTCN PAM
uucauuucaaaauuacacca

SEQ ID NO: 39362 - RNA, 20 nt, Artificial Sequence
  HTT spacer sequence TTCN PAM
uacugaaucaguccccaguu

SEQ ID NO: 39363 - RNA, 20 nt, Artificial Sequence
  HTT spacer sequence TTCN PAM
guaagaaauggcacaggcau

SEQ ID NO: 39364 - RNA, 20 nt, Artificial Sequence
  HTT spacer sequence TTCN PAM
auauuuaauaauaagcugga

SEQ ID NO: 39365 - RNA, 20 nt, Artificial Sequence
  HTT spacer sequence TTCN PAM
acaucuaggaaccuacccaa

SEQ ID NO: 39366 - RNA, 20 nt, Artificial Sequence
  HTT spacer sequence TTCN PAM
aguuuauauuuuugucagua

SEQ ID NO: 39367 - RNA, 20 nt, Artificial Sequence
  HTT spacer sequence TTCN PAM
cucucucucucucucucucu

SEQ ID NO: 39368 - RNA, 20 nt, Artificial Sequence
  HTT spacer sequence TTCN PAM
auaaaaaagggggcauucuc

SEQ ID NO: 39369 - RNA, 20 nt, Artificial Sequence
  HTT spacer sequence TTCN PAM
ccuucaauaaaaaagggggc

SEQ ID NO: 39370 - RNA, 20 nt, Artificial Sequence
  HTT spacer sequence TTCN PAM
guacaucaaaauaacacaaa

SEQ ID NO: 39371 - RNA, 20 nt, Artificial Sequence
  HTT spacer sequence TTCN PAM
uuucacccaguuuauuggca

SEQ ID NO: 39372 - RNA, 20 nt, Artificial Sequence
  HTT spacer sequence TTCN PAM
cccaguuuauuggcagguuc

SEQ ID NO: 39373 - RNA, 20 nt, Artificial Sequence
  HTT spacer sequence TTCN PAM
guggccuuugccuuuuccag

SEQ ID NO: 39374 - RNA, 20 nt, Artificial Sequence
  HTT spacer sequence TTCN PAM
agcuuggcaacgugagccac

SEQ ID NO: 39375 - RNA, 20 nt, Artificial Sequence
  HTT spacer sequence TTCN PAM
cagcgauggcagaucuuguc

SEQ ID NO: 39376 - RNA, 20 nt, Artificial Sequence
  HTT spacer sequence TTCN PAM
accagcuuagagcucccuug

SEQ ID NO: 39377 - RNA, 20 nt, Artificial Sequence
  HTT spacer sequence TTCN PAM
aaguuaaccugugugaaggc

SEQ ID NO: 39378 - RNA, 20 nt, Artificial Sequence
  HTT spacer sequence TTCN PAM
cacagguuaacuuggaagac

SEQ ID NO: 39379 - RNA, 20 nt, Artificial Sequence
  HTT spacer sequence TTCN PAM
cuugacagugcggucgggaa

SEQ ID NO: 39380 - RNA, 20 nt, Artificial Sequence
  HTT spacer sequence TTCN PAM
cgaccgcacugucaagggaa

SEQ ID NO: 39381 - RNA, 20 nt, Artificial Sequence
  HTT spacer sequence TTCN PAM
ugccugccugcguccugaga

SEQ ID NO: 39382 - RNA, 20 nt, Artificial Sequence
  HTT spacer sequence TTCN PAM
cguucuccaccaagguugug

SEQ ID NO: 39383 - RNA, 20 nt, Artificial Sequence
  HTT spacer sequence TTCN PAM
ccaccaagguugugacagua

SEQ ID NO: 39384 - RNA, 20 nt, Artificial Sequence
  HTT spacer sequence TTCN PAM
agcagggguugauacuguca

SEQ ID NO: 39385 - RNA, 20 nt, Artificial Sequence
  HTT spacer sequence TTCN PAM
ucucuugcuugucucugguu

SEQ ID NO: 39386 - RNA, 20 nt, Artificial Sequence
  HTT spacer sequence TTCN PAM
cuugcuugucucugguuggu

SEQ ID NO: 39387 - RNA, 20 nt, Artificial Sequence
  HTT spacer sequence TTCN PAM
cccaggccucaggccacagg

SEQ ID NO: 39388 - RNA, 20 nt, Artificial Sequence
  HTT spacer sequence TTCN PAM
gccauucauggaggauggcc

SEQ ID NO: 39389 - RNA, 20 nt, Artificial Sequence
  HTT spacer sequence TTCN PAM
uggaggauggcccuuugcca

SEQ ID NO: 39390 - RNA, 20 nt, Artificial Sequence
  HTT spacer sequence TTCN PAM
gcaguggacaggacguccag

SEQ ID NO: 39391 - RNA, 20 nt, Artificial Sequence
  HTT spacer sequence TTCN PAM
uagggcuuuccucagacguc

SEQ ID NO: 39392 - RNA, 20 nt, Artificial Sequence
  HTT spacer sequence TTCN PAM
ucagacguccaucuucuugg

SEQ ID NO: 39393 - RNA, 20 nt, Artificial Sequence
  HTT spacer sequence TTCN PAM
uggccaucugcugcugcaug

SEQ ID NO: 39394 - RNA, 20 nt, Artificial Sequence
  HTT spacer sequence TTCN PAM
cuuuggccuucuucccuuuc

SEQ ID NO: 39395 - RNA, 20 nt, Artificial Sequence
  HTT spacer sequence TTCN PAM
ucccuuucagcaucuuaggu

SEQ ID NO: 39396 - RNA, 20 nt, Artificial Sequence
  HTT spacer sequence TTCN PAM
cuuucagcaucuuagguagc

SEQ ID NO: 39397 - RNA, 20 nt, Artificial Sequence
  HTT spacer sequence TTCN PAM
gcaucuuagguagcuggaga

SEQ ID NO: 39398 - RNA, 20 nt, Artificial Sequence
  HTT spacer sequence TTCN PAM
ccagcuaccuaagaugcuga

SEQ ID NO: 39399 - RNA, 20 nt, Artificial Sequence
  HTT spacer sequence TTCN PAM
uccuacccauguagcucugg

SEQ ID NO: 39400 - RNA, 20 nt, Artificial Sequence
  HTT spacer sequence TTCN PAM
uacccauguagcucuggagu

SEQ ID NO: 39401 - RNA, 20 nt, Artificial Sequence
  HTT spacer sequence TTCN PAM
ccuuuggcagauuuuuuuau

SEQ ID NO: 39402 - RNA, 20 nt, Artificial Sequence
  HTT spacer sequence TTCN PAM
auuuuuccccuuuggcagau

SEQ ID NO: 39403 - RNA, 20 nt, Artificial Sequence
  HTT spacer sequence TTCN PAM
uuuucaauuuuuccccuuug

SEQ ID NO: 39404 - RNA, 20 nt, Artificial Sequence
  HTT spacer sequence TTCN PAM
uucauuuucaauuuuucccc

SEQ ID NO: 39405 - RNA, 20 nt, Artificial Sequence
  HTT spacer sequence TTCN PAM
cacucucuauuugaccucca

SEQ ID NO: 39406 - RNA, 20 nt, Artificial Sequence
  HTT spacer sequence TTCN PAM
ugggaggaguuuucugaaag

SEQ ID NO: 39407 - RNA, 20 nt, Artificial Sequence
  HTT spacer sequence TTCN PAM
gaaaggugauuuaugcaugc

SEQ ID NO: 39408 - RNA, 20 nt, Artificial Sequence
  HTT spacer sequence TTCN PAM
gaaaacuccucccaagaaaa

SEQ ID NO: 39409 - RNA, 20 nt, Artificial Sequence
  HTT spacer sequence TTCN PAM
uugguucaggaaugcggcuu

SEQ ID NO: 39410 - RNA, 20 nt, Artificial Sequence
  HTT spacer sequence TTCN PAM
ggaaugcggcuuaaguuuua

SEQ ID NO: 39411 - RNA, 20 nt, Artificial Sequence
  HTT spacer sequence TTCN PAM
ugaaccaaggaauccuaucc

SEQ ID NO: 39412 - RNA, 20 nt, Artificial Sequence
  HTT spacer sequence TTCN PAM
uaucaaacaaaucaaaauaa

SEQ ID NO: 39413 - RNA, 20 nt, Artificial Sequence
  HTT spacer sequence TTCN PAM
acauaugcaaaucaauaaau

SEQ ID NO: 39414 - RNA, 20 nt, Artificial Sequence
  HTT spacer sequence TTCN PAM
acauaguacuggaaguccua

SEQ ID NO: 39415 - RNA, 20 nt, Artificial Sequence
  HTT spacer sequence TTCN PAM
aguacuauguugaauaggag

SEQ ID NO: 39416 - RNA, 20 nt, Artificial Sequence
  HTT spacer sequence TTCN PAM
ucuugccugacugcucuggc

SEQ ID NO: 39417 - RNA, 20 nt, Artificial Sequence
  HTT spacer sequence TTCN PAM
cuaauugguaugccuuuuau

SEQ ID NO: 39418 - RNA, 20 nt, Artificial Sequence
  HTT spacer sequence TTCN PAM
uuauaccaauaaugaucuag

SEQ ID NO: 39419 - RNA, 20 nt, Artificial Sequence
  HTT spacer sequence TTCN PAM
cagcuagaucauuauuggua

SEQ ID NO: 39420 - RNA, 20 nt, Artificial Sequence
  HTT spacer sequence TTCN PAM
uucucagcuagaucauuauu

SEQ ID NO: 39421 - RNA, 20 nt, Artificial Sequence
  HTT spacer sequence TTCN PAM
uugauuucuuucucagcuag

SEQ ID NO: 39422 - RNA, 20 nt, Artificial Sequence
  HTT spacer sequence TTCN PAM
gacaguauggucacuuuaau

SEQ ID NO: 39423 - RNA, 20 nt, Artificial Sequence
  HTT spacer sequence TTCN PAM
auguaaucccuaccaaaaua

SEQ ID NO: 39424 - RNA, 20 nt, Artificial Sequence
  HTT spacer sequence TTCN PAM
cggaaguagaaaacgcaauc

SEQ ID NO: 39425 - RNA, 20 nt, Artificial Sequence
  HTT spacer sequence TTCN PAM
gugaaaaauuacguagguau

SEQ ID NO: 39426 - RNA, 20 nt, Artificial Sequence
  HTT spacer sequence TTCN PAM
acuuccgugaaaaauuacgu

SEQ ID NO: 39427 - RNA, 20 nt, Artificial Sequence
  HTT spacer sequence TTCN PAM
auauaaauuuuaggauugcg

SEQ ID NO: 39428 - RNA, 20 nt, Artificial Sequence
  HTT spacer sequence TTCN PAM
ggcucuuuuuugguuccaua

SEQ ID NO: 39429 - RNA, 20 nt, Artificial Sequence
  HTT spacer sequence TTCN PAM
aagcaaaaagaacaaagcug

SEQ ID NO: 39430 - RNA, 20 nt, Artificial Sequence
  HTT spacer sequence TTCN PAM
uuuugcuuagaauugcuuug

SEQ ID NO: 39431 - RNA, 20 nt, Artificial Sequence
  HTT spacer sequence TTCN PAM
aauuauacaaggcuguagua

SEQ ID NO: 39432 - RNA, 20 nt, Artificial Sequence
  HTT spacer sequence TTCN PAM
cuauuuuguugucuaguuuu

SEQ ID NO: 39433 - RNA, 20 nt, Artificial Sequence
  HTT spacer sequence TTCN PAM
ggguucucuauuuuguuguc

SEQ ID NO: 39434 - RNA, 20 nt, Artificial Sequence
  HTT spacer sequence TTCN PAM
ucccccuugucuacuaacca

SEQ ID NO: 39435 - RNA, 20 nt, Artificial Sequence
  HTT spacer sequence TTCN PAM
ccuuggaguuaaaggugacc

SEQ ID NO: 39436 - RNA, 20 nt, Artificial Sequence
  HTT spacer sequence TTCN PAM
caacaacagcaccuagaaca

SEQ ID NO: 39437 - RNA, 20 nt, Artificial Sequence
  HTT spacer sequence TTCN PAM
aggugcuguuguugcgaaca

SEQ ID NO: 39438 - RNA, 20 nt, Artificial Sequence
  HTT spacer sequence TTCN PAM
aacugccaggcacuguucua

SEQ ID NO: 39439 - RNA, 20 nt, Artificial Sequence
  HTT spacer sequence TTCN PAM
aucaaaaaaaauauuaagug

SEQ ID NO: 39440 - RNA, 20 nt, Artificial Sequence
  HTT spacer sequence TTCN PAM
uucaaucaaaaaaaauauua

SEQ ID NO: 39441 - RNA, 20 nt, Artificial Sequence
  HTT spacer sequence TTCN PAM
uauucccaucauaagaaguu

SEQ ID NO: 39442 - RNA, 20 nt, Artificial Sequence
  HTT spacer sequence TTCN PAM
uuugaaggaaaaguaaaaau

SEQ ID NO: 39443 - RNA, 20 nt, Artificial Sequence
  HTT spacer sequence TTCN PAM
aaggaaguuuuuuuuuagua

SEQ ID NO: 39444 - RNA, 20 nt, Artificial Sequence
  HTT spacer sequence TTCN PAM
uucaaaggaaguuuuuuuuu

SEQ ID NO: 39445 - RNA, 20 nt, Artificial Sequence
  HTT spacer sequence TTCN PAM
uauuaaaauaauuuuuuaaa

SEQ ID NO: 39446 - RNA, 20 nt, Artificial Sequence
  HTT spacer sequence TTCN PAM
gcacauagauuuuacgcugc

SEQ ID NO: 39447 - RNA, 20 nt, Artificial Sequence
  HTT spacer sequence TTCN PAM
aguacaaugagaggaaguuu

SEQ ID NO: 39448 - RNA, 20 nt, Artificial Sequence
  HTT spacer sequence TTCN PAM
ucucauuguacuggaaaagc

SEQ ID NO: 39449 - RNA, 20 nt, Artificial Sequence
  HTT spacer sequence TTCN PAM
aaauagauuguaaaaaaaaa

SEQ ID NO: 39450 - RNA, 20 nt, Artificial Sequence
  HTT spacer sequence TTCN PAM
aaaagggucacagcucaggc

SEQ ID NO: 39451 - RNA, 20 nt, Artificial Sequence
  HTT spacer sequence TTCN PAM
cccuuuuuccccuuaaaguu

SEQ ID NO: 39452 - RNA, 20 nt, Artificial Sequence
  HTT spacer sequence TTCN PAM
accugaggaagcugguugaa

SEQ ID NO: 39453 - RNA, 20 nt, Artificial Sequence
  HTT spacer sequence TTCN PAM
ucagguugaagcauuuacaa

SEQ ID NO: 39454 - RNA, 20 nt, Artificial Sequence
  HTT spacer sequence TTCN PAM
accagcuuccucagguugaa

SEQ ID NO: 39455 - RNA, 20 nt, Artificial Sequence
  HTT spacer sequence TTCN PAM
uugagaucauguuucugccu

SEQ ID NO: 39456 - RNA, 20 nt, Artificial Sequence
  HTT spacer sequence TTCN PAM
gccuuuugaugcuaacaugg

SEQ ID NO: 39457 - RNA, 20 nt, Artificial Sequence
  HTT spacer sequence TTCN PAM
aauaauagaccauacuugca

SEQ ID NO: 39458 - RNA, 20 nt, Artificial Sequence
  HTT spacer sequence TTCN PAM
ugagauaaaccuaacuuaug

SEQ ID NO: 39459 - RNA, 20 nt, Artificial Sequence
  HTT spacer sequence TTCN PAM
accauuaauuuuuuguuuug

SEQ ID NO: 39460 - RNA, 20 nt, Artificial Sequence
  HTT spacer sequence TTCN PAM
auuccucuuccuucucuuuu

SEQ ID NO: 39461 - RNA, 20 nt, Artificial Sequence
  HTT spacer sequence TTCN PAM
ucuuccuucucuuuucccuc

SEQ ID NO: 39462 - RNA, 20 nt, Artificial Sequence
  HTT spacer sequence TTCN PAM
uucucuuuucccucccuuuc

SEQ ID NO: 39463 - RNA, 20 nt, Artificial Sequence
  HTT spacer sequence TTCN PAM
cuuuucccucccuuucuucu

SEQ ID NO: 39464 - RNA, 20 nt, Artificial Sequence
  HTT spacer sequence TTCN PAM
cucccuuucuucuccuuuuc

SEQ ID NO: 39465 - RNA, 20 nt, Artificial Sequence
  HTT spacer sequence TTCN PAM
ucuccuuuuccucguauauu

SEQ ID NO: 39466 - RNA, 20 nt, Artificial Sequence
  HTT spacer sequence TTCN PAM
ccuuuuccucguauauugaa

SEQ ID NO: 39467 - RNA, 20 nt, Artificial Sequence
  HTT spacer sequence TTCN PAM
ucguauauugaaucuuauau

SEQ ID NO: 39468 - RNA, 20 nt, Artificial Sequence
  HTT spacer sequence TTCN PAM
auauacgaggaaaaggagaa

SEQ ID NO: 39469 - RNA, 20 nt, Artificial Sequence
  HTT spacer sequence TTCN PAM
auaacuuuuuauuuaaaaau

SEQ ID NO: 39470 - RNA, 20 nt, Artificial Sequence
  HTT spacer sequence TTCN PAM
auuucuguuuucgaauuguu

SEQ ID NO: 39471 - RNA, 20 nt, Artificial Sequence
  HTT spacer sequence TTCN PAM
guuuucgaauuguuacuaua

SEQ ID NO: 39472 - RNA, 20 nt, Artificial Sequence
  HTT spacer sequence TTCN PAM
aauuguuacuauaaguggca

SEQ ID NO: 39473 - RNA, 20 nt, Artificial Sequence
  HTT spacer sequence TTCN PAM
aaaacagaaauggaaaaguu

SEQ ID NO: 39474 - RNA, 20 nt, Artificial Sequence
  HTT spacer sequence TTCN PAM
gacagcucaagaagaagauc

SEQ ID NO: 39475 - RNA, 20 nt, Artificial Sequence
  HTT spacer sequence TTCN PAM
ugagcugucagaacaaucug

SEQ ID NO: 39476 - RNA, 20 nt, Artificial Sequence
  HTT spacer sequence TTCN PAM
ucuugagcugucagaacaau

SEQ ID NO: 39477 - RNA, 20 nt, Artificial Sequence
  HTT spacer sequence TTCN PAM
uccugugaauccacuuuuuc

SEQ ID NO: 39478 - RNA, 20 nt, Artificial Sequence
  HTT spacer sequence TTCN PAM
ugugaauccacuuuuucuag

SEQ ID NO: 39479 - RNA, 20 nt, Artificial Sequence
  HTT spacer sequence TTCN PAM
caggaagaaugcaguaauau

SEQ ID NO: 39480 - RNA, 20 nt, Artificial Sequence
  HTT spacer sequence TTCN PAM
agguucucccucccugcuuu

SEQ ID NO: 39481 - RNA, 20 nt, Artificial Sequence
  HTT spacer sequence TTCN PAM
cccucccugcuuucuugccu

SEQ ID NO: 39482 - RNA, 20 nt, Artificial Sequence
  HTT spacer sequence TTCN PAM
ugccuuauguuuuguuuugu

SEQ ID NO: 39483 - RNA, 20 nt, Artificial Sequence
  HTT spacer sequence TTCN PAM
agccugguugguuuauuucc

SEQ ID NO: 39484 - RNA, 20 nt, Artificial Sequence
  HTT spacer sequence TTCN PAM
uuaguccacacccaccuccu

SEQ ID NO: 39485 - RNA, 20 nt, Artificial Sequence
  HTT spacer sequence TTCN PAM
aaaauaucuuagggccuaug

SEQ ID NO: 39486 - RNA, 20 nt, Artificial Sequence
  HTT spacer sequence TTCN PAM
uguguaauauucaucuuuuu

SEQ ID NO: 39487 - RNA, 20 nt, Artificial Sequence
  HTT spacer sequence TTCN PAM
aacauaaaacuagacaaacu

SEQ ID NO: 39488 - RNA, 20 nt, Artificial Sequence
  HTT spacer sequence TTCN PAM
auuucaaacauaaaacuaga

SEQ ID NO: 39489 - RNA, 20 nt, Artificial Sequence
  HTT spacer sequence TTCN PAM
aaaauaguuuugcuuuuggg

SEQ ID NO: 39490 - RNA, 20 nt, Artificial Sequence
  HTT spacer sequence TTCN PAM
aagcccaaaagcaaaacuau

SEQ ID NO: 39491 - RNA, 20 nt, Artificial Sequence
  HTT spacer sequence TTCN PAM
uccugccgcacagaguuuug

SEQ ID NO: 39492 - RNA, 20 nt, Artificial Sequence
  HTT spacer sequence TTCN PAM
ugccgcacagaguuuuguaa

SEQ ID NO: 39493 - RNA, 20 nt, Artificial Sequence
  HTT spacer sequence TTCN PAM
ugugauauuauuuagauugc

SEQ ID NO: 39494 - RNA, 20 nt, Artificial Sequence
  HTT spacer sequence TTCN PAM
augcccgcaauaaaucaucc

SEQ ID NO: 39495 - RNA, 20 nt, Artificial Sequence
  HTT spacer sequence TTCN PAM
uuccaugcccgcaauaaauc

SEQ ID NO: 39496 - RNA, 20 nt, Artificial Sequence
  HTT spacer sequence TTCN PAM
aaaauguguaugucagcauc

SEQ ID NO: 39497 - RNA, 20 nt, Artificial Sequence
  HTT spacer sequence TTCN PAM
ugcggcugagggccaagggc

SEQ ID NO: 39498 - RNA, 20 nt, Artificial Sequence
  HTT spacer sequence TTCN PAM
ggggugugugcucuuucccc

SEQ ID NO: 39499 - RNA, 20 nt, Artificial Sequence
  HTT spacer sequence TTCN PAM
ccuuccuggccaaugagagg

SEQ ID NO: 39500 - RNA, 20 nt, Artificial Sequence
  HTT spacer sequence TTCN PAM
uggccaaugagaggacagug

SEQ ID NO: 39501 - RNA, 20 nt, Artificial Sequence
  HTT spacer sequence TTCN PAM
cuguccucucauuggccagg

SEQ ID NO: 39502 - RNA, 20 nt, Artificial Sequence
  HTT spacer sequence TTCN PAM
cuacugggaaguggguuggg

SEQ ID NO: 39503 - RNA, 20 nt, Artificial Sequence
  HTT spacer sequence TTCN PAM
caguagugaaaacacacagc

SEQ ID NO: 39504 - RNA, 20 nt, Artificial Sequence
  HTT spacer sequence TTCN PAM
gaggguccugccccccaacc

SEQ ID NO: 39505 - RNA, 20 nt, Artificial Sequence
  HTT spacer sequence TTCN PAM
gcacauccugucugaccacc

SEQ ID NO: 39506 - RNA, 20 nt, Artificial Sequence
  HTT spacer sequence TTCN PAM
aguggguguaccgcucgugu

SEQ ID NO: 39507 - RNA, 20 nt, Artificial Sequence
  HTT spacer sequence TTCN PAM
agcugcugccccuaccgugu

SEQ ID NO: 39508 - RNA, 20 nt, Artificial Sequence
  HTT spacer sequence TTCN PAM
uugguccccucccccuuggg

SEQ ID NO: 39509 - RNA, 20 nt, Artificial Sequence
  HTT spacer sequence TTCN PAM
ucugggccucacuuguuugg

SEQ ID NO: 39510 - RNA, 20 nt, Artificial Sequence
  HTT spacer sequence TTCN PAM
cgggaguggccaggagguac

SEQ ID NO: 39511 - RNA, 20 nt, Artificial Sequence
  HTT spacer sequence TTCN PAM
cguucgcuccccuggcccug

SEQ ID NO: 39512 - RNA, 20 nt, Artificial Sequence
  HTT spacer sequence TTCN PAM
cuccccuggcccuggcagcc

SEQ ID NO: 39513 - RNA, 20 nt, Artificial Sequence
  HTT spacer sequence TTCN PAM
guccuccucucugccaaggc

SEQ ID NO: 39514 - RNA, 20 nt, Artificial Sequence
  HTT spacer sequence TTCN PAM
ugcggggaccucccagacgg

SEQ ID NO: 39515 - RNA, 20 nt, Artificial Sequence
  HTT spacer sequence TTCN PAM
ugccuagauagcagcagagu

SEQ ID NO: 39516 - RNA, 20 nt, Artificial Sequence
  HTT spacer sequence TTCN PAM
gcucacccccucucacuucc

SEQ ID NO: 39517 - RNA, 20 nt, Artificial Sequence
  HTT spacer sequence TTCN PAM
uggcauccguguccccuggu

SEQ ID NO: 39518 - RNA, 20 nt, Artificial Sequence
  HTT spacer sequence TTCN PAM
gauuccucuccuuccugggc

SEQ ID NO: 39519 - RNA, 20 nt, Artificial Sequence
  HTT spacer sequence TTCN PAM
ucuccuuccugggcugaguc

SEQ ID NO: 39520 - RNA, 20 nt, Artificial Sequence
  HTT spacer sequence TTCN PAM
ugggcugaguccugggcuug

SEQ ID NO: 39521 - RNA, 20 nt, Artificial Sequence
  HTT spacer sequence TTCN PAM
ugccagugcagugccagguc

SEQ ID NO: 39522 - RNA, 20 nt, Artificial Sequence
  HTT spacer sequence TTCN PAM
uguucuuuucggcuuccucc

SEQ ID NO: 39523 - RNA, 20 nt, Artificial Sequence
  HTT spacer sequence TTCN PAM
uuucggcuuccuccuggcuc

SEQ ID NO: 39524 - RNA, 20 nt, Artificial Sequence
  HTT spacer sequence TTCN PAM
gcuuccuccuggcucagcug

SEQ ID NO: 39525 - RNA, 20 nt, Artificial Sequence
  HTT spacer sequence TTCN PAM
uccuggcucagcugacuguc

SEQ ID NO: 39526 - RNA, 20 nt, Artificial Sequence
  HTT spacer sequence TTCN PAM
cggccuccuccuggucacgc

SEQ ID NO: 39527 - RNA, 20 nt, Artificial Sequence
  HTT spacer sequence TTCN PAM
gguaccgccugccaccccuc

SEQ ID NO: 39528 - RNA, 20 nt, Artificial Sequence
  HTT spacer sequence TTCN PAM
uaacuugacuugucuguucu

SEQ ID NO: 39529 - RNA, 20 nt, Artificial Sequence
  HTT spacer sequence TTCN PAM
ugucccuggugccuuuaagc

SEQ ID NO: 39530 - RNA, 20 nt, Artificial Sequence
  HTT spacer sequence TTCN PAM
acuguuccaagccccuuccu

SEQ ID NO: 39531 - RNA, 20 nt, Artificial Sequence
  HTT spacer sequence TTCN PAM
aagccccuuccucggaggcg

SEQ ID NO: 39532 - RNA, 20 nt, Artificial Sequence
  HTT spacer sequence TTCN PAM
ucggaggcgucuccccaacc

SEQ ID NO: 39533 - RNA, 20 nt, Artificial Sequence
  HTT spacer sequence TTCN PAM
acuccugugggagggcagug

SEQ ID NO: 39534 - RNA, 20 nt, Artificial Sequence
  HTT spacer sequence TTCN PAM
guagcaucaugcccuguaag

SEQ ID NO: 39535 - RNA, 20 nt, Artificial Sequence
  HTT spacer sequence TTCN PAM
caaacuucaguagcaucaug

SEQ ID NO: 39536 - RNA, 20 nt, Artificial Sequence
  HTT spacer sequence TTCN PAM
uugacgcuguuacuaagacu

SEQ ID NO: 39537 - RNA, 20 nt, Artificial Sequence
  HTT spacer sequence TTCN PAM
uuucacaugaaaaggaugac

SEQ ID NO: 39538 - RNA, 20 nt, Artificial Sequence
  HTT spacer sequence TTCN PAM
caugaaaaggaugacuuccu

SEQ ID NO: 39539 - RNA, 20 nt, Artificial Sequence
  HTT spacer sequence TTCN PAM
ugugaaaagaacagauccca

SEQ ID NO: 39540 - RNA, 20 nt, Artificial Sequence
  HTT spacer sequence TTCN PAM
ucuuguugggugucaccuag

SEQ ID NO: 39541 - RNA, 20 nt, Artificial Sequence
  HTT spacer sequence TTCN PAM
cgggacaccuccaccuggag

SEQ ID NO: 39542 - RNA, 20 nt, Artificial Sequence
  HTT spacer sequence TTCN PAM
cagaggcacucuccaggugg

SEQ ID NO: 39543 - RNA, 20 nt, Artificial Sequence
  HTT spacer sequence TTCN PAM
ucagauggacuuuucguuuc

SEQ ID NO: 39544 - RNA, 20 nt, Artificial Sequence
  HTT spacer sequence TTCN PAM
uuuccuggaguuuugucaug

SEQ ID NO: 39545 - RNA, 20 nt, Artificial Sequence
  HTT spacer sequence TTCN PAM
uggaguuuugucaugaggcu

SEQ ID NO: 39546 - RNA, 20 nt, Artificial Sequence
  HTT spacer sequence TTCN PAM
uucagucugcaacugugucu

SEQ ID NO: 39547 - RNA, 20 nt, Artificial Sequence
  HTT spacer sequence TTCN PAM
gucugcaacugugucugaug

SEQ ID NO: 39548 - RNA, 20 nt, Artificial Sequence
  HTT spacer sequence TTCN PAM
gauguauauauuuuuuauuu

SEQ ID NO: 39549 - RNA, 20 nt, Artificial Sequence
  HTT spacer sequence TTCN PAM
uaaaguuuucaaauugugaa

SEQ ID NO: 39550 - RNA, 20 nt, Artificial Sequence
  HTT spacer sequence TTCN PAM
aauugugaaaguguauuugc

SEQ ID NO: 39551 - RNA, 20 nt, Artificial Sequence
  HTT spacer sequence TTCN PAM
caauuugaaaacuuuaugaa

SEQ ID NO: 39552 - RNA, 20 nt, Artificial Sequence
  HTT spacer sequence TTCN PAM
ugagggcaucaaauggcaaa

SEQ ID NO: 39553 - RNA, 20 nt, Artificial Sequence
  HTT spacer sequence TTCN PAM
cugucuccuugugggcgggu

SEQ ID NO: 39554 - RNA, 20 nt, Artificial Sequence
  HTT spacer sequence TTCN PAM
aggugaguuaauucuggggg

SEQ ID NO: 39555 - RNA, 20 nt, Artificial Sequence
  HTT spacer sequence TTCN PAM
gggggcgcuuucugugacac

SEQ ID NO: 39556 - RNA, 20 nt, Artificial Sequence
  HTT spacer sequence TTCN PAM
gugacacccagguggccucg

SEQ ID NO: 39557 - RNA, 20 nt, Artificial Sequence
  HTT spacer sequence TTCN PAM
aaaacacacgccgaggccac

SEQ ID NO: 39558 - RNA, 20 nt, Artificial Sequence
  HTT spacer sequence TTCN PAM
cuuaacaaacagcuuccaaa

SEQ ID NO: 39559 - RNA, 20 nt, Artificial Sequence
  HTT spacer sequence TTCN PAM
gggccauggcaguucucuua

SEQ ID NO: 39560 - RNA, 20 nt, Artificial Sequence
  HTT spacer sequence TTCN PAM
cuuguuguauaaccagcuuu

SEQ ID NO: 39561 - RNA, 20 nt, Artificial Sequence
  HTT spacer sequence TTCN PAM
aagugcuuucugaauuugag

SEQ ID NO: 39562 - RNA, 20 nt, Artificial Sequence
  HTT spacer sequence TTCN PAM
gaauuugagcaauucaggaa

SEQ ID NO: 39563 - RNA, 20 nt, Artificial Sequence
  HTT spacer sequence TTCN PAM
gaaagcacuuugaaaucuua

SEQ ID NO: 39564 - RNA, 20 nt, Artificial Sequence
  HTT spacer sequence TTCN PAM
ggaaauuugggugagaccca

SEQ ID NO: 39565 - RNA, 20 nt, Artificial Sequence
  HTT spacer sequence TTCN PAM
ugaauugcucaaauucagaa

SEQ ID NO: 39566 - RNA, 20 nt, Artificial Sequence
  HTT spacer sequence TTCN PAM
gggucucacccaaauuuccu

SEQ ID NO: 39567 - RNA, 20 nt, Artificial Sequence
  HTT spacer sequence TTCN PAM
caagaaaaguauaauagacg

SEQ ID NO: 39568 - RNA, 20 nt, Artificial Sequence
  HTT spacer sequence TTCN PAM
ugagaaaauucugggucuca

SEQ ID NO: 39569 - RNA, 20 nt, Artificial Sequence
  HTT spacer sequence TTCN PAM
ucuauuauacuuuucuugag

SEQ ID NO: 39570 - RNA, 20 nt, Artificial Sequence
  HTT spacer sequence TTCN PAM
ucccacacucucaauucguc

SEQ ID NO: 39571 - RNA, 20 nt, Artificial Sequence
  HTT spacer sequence TTCN PAM
ucuucaucccacacucucaa

SEQ ID NO: 39572 - RNA, 20 nt, Artificial Sequence
  HTT spacer sequence TTCN PAM
guguuuaaagaauuuugugc

SEQ ID NO: 39573 - RNA, 20 nt, Artificial Sequence
  HTT spacer sequence TTCN PAM
uuaaacacagaaaguaaguu

SEQ ID NO: 39574 - RNA, 20 nt, Artificial Sequence
  HTT spacer sequence TTCN PAM
uuucauggacugauugaaaa

SEQ ID NO: 39575 - RNA, 20 nt, Artificial Sequence
  HTT spacer sequence TTCN PAM
uggacugauugaaaaggaag

SEQ ID NO: 39576 - RNA, 20 nt, Artificial Sequence
  HTT spacer sequence TTCN PAM
aucaguccaugaaaagaauc

SEQ ID NO: 39577 - RNA, 20 nt, Artificial Sequence
  HTT spacer sequence TTCN PAM
uuuucaaucaguccaugaaa

SEQ ID NO: 39578 - RNA, 20 nt, Artificial Sequence
  HTT spacer sequence TTCN PAM
ugccuacuuccuuuucaauc

SEQ ID NO: 39579 - RNA, 20 nt, Artificial Sequence
  HTT spacer sequence TTCN PAM
cugaagauuucucugauguc

SEQ ID NO: 39580 - RNA, 20 nt, Artificial Sequence
  HTT spacer sequence TTCN PAM
gugaaauaagacauuccugc

SEQ ID NO: 39581 - RNA, 20 nt, Artificial Sequence
  HTT spacer sequence TTCN PAM
cugaugucauccuuaucauu

SEQ ID NO: 39582 - RNA, 20 nt, Artificial Sequence
  HTT spacer sequence TTCN PAM
augauuuaaaaaaaccucuc

SEQ ID NO: 39583 - RNA, 20 nt, Artificial Sequence
  HTT spacer sequence TTCN PAM
uccgaaauauuccucuuuuc

SEQ ID NO: 39584 - RNA, 20 nt, Artificial Sequence
  HTT spacer sequence TTCN PAM
gaggaacucuccuuacuuug

SEQ ID NO: 39585 - RNA, 20 nt, Artificial Sequence
  HTT spacer sequence TTCN PAM
ucuuuucuucuaacacuccu

SEQ ID NO: 39586 - RNA, 20 nt, Artificial Sequence
  HTT spacer sequence TTCN PAM
ucuaacacuccugacagucc

SEQ ID NO: 39587 - RNA, 20 nt, Artificial Sequence
  HTT spacer sequence TTCN PAM
aacacuccugacaguccgca

SEQ ID NO: 39588 - RNA, 20 nt, Artificial Sequence
  HTT spacer sequence TTCN PAM
ucgucaccucacgcuuuugu

SEQ ID NO: 39589 - RNA, 20 nt, Artificial Sequence
  HTT spacer sequence TTCN PAM
gucccugagagcuggaauag

SEQ ID NO: 39590 - RNA, 20 nt, Artificial Sequence
  HTT spacer sequence TTCN PAM
agcucucagggacagaagug

SEQ ID NO: 39591 - RNA, 20 nt, Artificial Sequence
  HTT spacer sequence TTCN PAM
gcagcacagccugugccuca

SEQ ID NO: 39592 - RNA, 20 nt, Artificial Sequence
  HTT spacer sequence TTCN PAM
cuuuaacgcacaaauacagu

SEQ ID NO: 39593 - RNA, 20 nt, Artificial Sequence
  HTT spacer sequence TTCN PAM
cucacuuucugugguccugc

SEQ ID NO: 39594 - RNA, 20 nt, Artificial Sequence
  HTT spacer sequence TTCN PAM
gugguccugcagcugcuggc

SEQ ID NO: 39595 - RNA, 20 nt, Artificial Sequence
  HTT spacer sequence TTCN PAM
gaggccgaggacugaggcca

SEQ ID NO: 39596 - RNA, 20 nt, Artificial Sequence
  HTT spacer sequence TTCN PAM
uacagaguggcuggccugcg

SEQ ID NO: 39597 - RNA, 20 nt, Artificial Sequence
  HTT spacer sequence TTCN PAM
ggugccagugcguguguaac

SEQ ID NO: 39598 - RNA, 20 nt, Artificial Sequence
  HTT spacer sequence TTCN PAM
acaaaauacaucuccaccac

SEQ ID NO: 39599 - RNA, 20 nt, Artificial Sequence
  HTT spacer sequence TTCN PAM
uuuuauucuacaaaauacau

SEQ ID NO: 39600 - RNA, 20 nt, Artificial Sequence
  HTT spacer sequence TTCN PAM
auuuccuauuuuauguacaa

SEQ ID NO: 39601 - RNA, 20 nt, Artificial Sequence
  HTT spacer sequence TTCN PAM
uauuuuauguacaaugaaaa

SEQ ID NO: 39602 - RNA, 20 nt, Artificial Sequence
  HTT spacer sequence TTCN PAM
uuguacauaaaauaggaaau

SEQ ID NO: 39603 - RNA, 20 nt, Artificial Sequence
  HTT spacer sequence TTCN PAM
uuaaugaaaagaaacaggac

SEQ ID NO: 39604 - RNA, 20 nt, Artificial Sequence
  HTT spacer sequence TTCN PAM
uuaaggaaguuuauccuccc

SEQ ID NO: 39605 - RNA, 20 nt, Artificial Sequence
  HTT spacer sequence TTCN PAM
uuucauuaaggaaguuuauc

SEQ ID NO: 39606 - RNA, 20 nt, Artificial Sequence
  HTT spacer sequence TTCN PAM
ggguccuguuucuuuucauu

SEQ ID NO: 39607 - RNA, 20 nt, Artificial Sequence
  HTT spacer sequence TTCN PAM
aaacaccggucacuuuaucc

SEQ ID NO: 39608 - RNA, 20 nt, Artificial Sequence
  HTT spacer sequence TTCN PAM
ugcuuucucuuucugccgug

SEQ ID NO: 39609 - RNA, 20 nt, Artificial Sequence
  HTT spacer sequence TTCN PAM
cuuucugccguguucucacu

SEQ ID NO: 39610 - RNA, 20 nt, Artificial Sequence
  HTT spacer sequence TTCN PAM
gccguguucucacuucuccu

SEQ ID NO: 39611 - RNA, 20 nt, Artificial Sequence
  HTT spacer sequence TTCN PAM
cacuucuccuuucuggcaga

SEQ ID NO: 39612 - RNA, 20 nt, Artificial Sequence
  HTT spacer sequence TTCN PAM
ccuuucuggcagaagacauu

SEQ ID NO: 39613 - RNA, 20 nt, Artificial Sequence
  HTT spacer sequence TTCN PAM
ggcagaagacauucauuucu

SEQ ID NO: 39614 - RNA, 20 nt, Artificial Sequence
  HTT spacer sequence TTCN PAM
gccagaaaggagaagugaga

SEQ ID NO: 39615 - RNA, 20 nt, Artificial Sequence
  HTT spacer sequence TTCN PAM
uuucuugcaggcaauuuaua

SEQ ID NO: 39616 - RNA, 20 nt, Artificial Sequence
  HTT spacer sequence TTCN PAM
ugcaggcaauuuauacauga

SEQ ID NO: 39617 - RNA, 20 nt, Artificial Sequence
  HTT spacer sequence TTCN PAM
uguauaaauugccugcaaga

SEQ ID NO: 39618 - RNA, 20 nt, Artificial Sequence
  HTT spacer sequence TTCN PAM
ccauauauaauaaguuuuau

SEQ ID NO: 39619 - RNA, 20 nt, Artificial Sequence
  HTT spacer sequence TTCN PAM
gucagcaauagaugcaggaa

SEQ ID NO: 39620 - RNA, 20 nt, Artificial Sequence
  HTT spacer sequence TTCN PAM
ugcaucuauugcugacagaa

SEQ ID NO: 39621 - RNA, 20 nt, Artificial Sequence
  HTT spacer sequence TTCN PAM
cacccuugggaggugcaggu

SEQ ID NO: 39622 - RNA, 20 nt, Artificial Sequence
  HTT spacer sequence TTCN PAM
ucagagggacacacagagcc

SEQ ID NO: 39623 - RNA, 20 nt, Artificial Sequence
  HTT spacer sequence TTCN PAM
ucagagggacacacagagcc

SEQ ID NO: 39624 - RNA, 20 nt, Artificial Sequence
  HTT spacer sequence TTCN PAM
acccccugcuccuccuucuu

SEQ ID NO: 39625 - RNA, 20 nt, Artificial Sequence
  HTT spacer sequence TTCN PAM
uuucccagugucagacccug

SEQ ID NO: 39626 - RNA, 20 nt, Artificial Sequence
  HTT spacer sequence TTCN PAM
cagugucagacccuggggcc

SEQ ID NO: 39627 - RNA, 20 nt, Artificial Sequence
  HTT spacer sequence TTCN PAM
gggugugcugaugacugucu

SEQ ID NO: 39628 - RNA, 20 nt, Artificial Sequence
  HTT spacer sequence TTCN PAM
ggaaccgcagugggcgggcu

SEQ ID NO: 39629 - RNA, 20 nt, Artificial Sequence
  HTT spacer sequence TTCN PAM
ugaaauucagggugugcuga

SEQ ID NO: 39630 - RNA, 20 nt, Artificial Sequence
  HTT spacer sequence TTCN PAM
uuuuuguguuuuuguuauuu

SEQ ID NO: 39631 - RNA, 20 nt, Artificial Sequence
  HTT spacer sequence TTCN PAM
aucuucaguuucuuugcuua

SEQ ID NO: 39632 - RNA, 20 nt, Artificial Sequence
  HTT spacer sequence TTCN PAM
guuucuuugcuuauaagagu

SEQ ID NO: 39633 - RNA, 20 nt, Artificial Sequence
  HTT spacer sequence TTCN PAM
uugcuuauaagaguaaaaag

SEQ ID NO: 39634 - RNA, 20 nt, Artificial Sequence
  HTT spacer sequence TTCN PAM
gccguuguuagauguagggc

SEQ ID NO: 39635 - RNA, 20 nt, Artificial Sequence
  HTT spacer sequence TTCN PAM
ccugcaggccugagucuggc

SEQ ID NO: 39636 - RNA, 20 nt, Artificial Sequence
  HTT spacer sequence TTCN PAM
ggugccucaggcagaaagag

SEQ ID NO: 39637 - RNA, 20 nt, Artificial Sequence
  HTT spacer sequence TTCN PAM
gccugaggcaccagaagggg

SEQ ID NO: 39638 - RNA, 20 nt, Artificial Sequence
  HTT spacer sequence TTCN PAM
cugggaccacccccccaccc

SEQ ID NO: 39639 - RNA, 20 nt, Artificial Sequence
  HTT spacer sequence TTCN PAM
acacagagaucuuuuuauag

SEQ ID NO: 39640 - RNA, 20 nt, Artificial Sequence
  HTT spacer sequence TTCN PAM
caggcccaccucagugcacu

SEQ ID NO: 39641 - RNA, 20 nt, Artificial Sequence
  HTT spacer sequence TTCN PAM
cauaaaaacacuggggugcu

SEQ ID NO: 39642 - RNA, 20 nt, Artificial Sequence
  HTT spacer sequence TTCN PAM
aaggagggacugaggaguug

SEQ ID NO: 39643 - RNA, 20 nt, Artificial Sequence
  HTT spacer sequence TTCN PAM
aagugagugaucuauuaauc

SEQ ID NO: 39644 - RNA, 20 nt, Artificial Sequence
  HTT spacer sequence TTCN PAM
acgagccgugccagugagag

SEQ ID NO: 39645 - RNA, 20 nt, Artificial Sequence
  HTT spacer sequence TTCN PAM
uguucaugccacgguuucau

SEQ ID NO: 39646 - RNA, 20 nt, Artificial Sequence
  HTT spacer sequence TTCN PAM
ugccacgguuucauucugug

SEQ ID NO: 39647 - RNA, 20 nt, Artificial Sequence
  HTT spacer sequence TTCN PAM
uucugugacgcguaucgugc

SEQ ID NO: 39648 - RNA, 20 nt, Artificial Sequence
  HTT spacer sequence TTCN PAM
gugacgcguaucgugcuuuu

SEQ ID NO: 39649 - RNA, 20 nt, Artificial Sequence
  HTT spacer sequence TTCN PAM
uuaaaaccgagccacaaaac

SEQ ID NO: 39650 - RNA, 20 nt, Artificial Sequence
  HTT spacer sequence TTCN PAM
cuuuuucagaagaaaggggc

SEQ ID NO: 39651 - RNA, 20 nt, Artificial Sequence
  HTT spacer sequence TTCN PAM
gaagaaaggggcugauaaug

SEQ ID NO: 39652 - RNA, 20 nt, Artificial Sequence
  HTT spacer sequence TTCN PAM
gaaaaagugaaaaaacacac

SEQ ID NO: 39653 - RNA, 20 nt, Artificial Sequence
  HTT spacer sequence TTCN PAM
ucugaaaaagugaaaaaaca

SEQ ID NO: 39654 - RNA, 20 nt, Artificial Sequence
  HTT spacer sequence TTCN PAM
cgagggcacucuuuggcuac

SEQ ID NO: 39655 - RNA, 20 nt, Artificial Sequence
  HTT spacer sequence TTCN PAM
agcuggagagaaggaagcac

SEQ ID NO: 39656 - RNA, 20 nt, Artificial Sequence
  HTT spacer sequence TTCN PAM
cuccagcuggaaucugcucc

SEQ ID NO: 39657 - RNA, 20 nt, Artificial Sequence
  HTT spacer sequence TTCN PAM
uucucuccagcuggaaucug

SEQ ID NO: 39658 - RNA, 20 nt, Artificial Sequence
  HTT spacer sequence TTCN PAM
agcauuauagagaggcuuag

SEQ ID NO: 39659 - RNA, 20 nt, Artificial Sequence
  HTT spacer sequence TTCN PAM
ccugcuaagccucucuauaa

SEQ ID NO: 39660 - RNA, 20 nt, Artificial Sequence
  HTT spacer sequence TTCN PAM
cacaaggcagaccauucccc

SEQ ID NO: 39661 - RNA, 20 nt, Artificial Sequence
  HTT spacer sequence TTCN PAM
gacagaagugugaggucgag

SEQ ID NO: 39662 - RNA, 20 nt, Artificial Sequence
  HTT spacer sequence TTCN PAM
gucugaauaacuucccacaa

SEQ ID NO: 39663 - RNA, 20 nt, Artificial Sequence
  HTT spacer sequence TTCN PAM
caacgccccaucucccucca

SEQ ID NO: 39664 - RNA, 20 nt, Artificial Sequence
  HTT spacer sequence TTCN PAM
ucacaacgccccaucucccu

SEQ ID NO: 39665 - RNA, 20 nt, Artificial Sequence
  HTT spacer sequence TTCN PAM
cauuucuucacaacgcccca

SEQ ID NO: 39666 - RNA, 20 nt, Artificial Sequence
  HTT spacer sequence TTCN PAM
uuuucucauuucuucacaac

SEQ ID NO: 39667 - RNA, 20 nt, Artificial Sequence
  HTT spacer sequence TTCN PAM
aggagcaaccgggcaucuuc

SEQ ID NO: 39668 - RNA, 20 nt, Artificial Sequence
  HTT spacer sequence TTCN PAM
uuuuuccaggagcaaccggg

SEQ ID NO: 39669 - RNA, 20 nt, Artificial Sequence
  HTT spacer sequence TTCN PAM
gugcggccgcggcuccagcu

SEQ ID NO: 39670 - RNA, 20 nt, Artificial Sequence
  HTT spacer sequence TTCN PAM
uguggcuuccuccguugguc

SEQ ID NO: 39671 - RNA, 20 nt, Artificial Sequence
  HTT spacer sequence TTCN PAM
uccguuggucaagcucugug

SEQ ID NO: 39672 - RNA, 20 nt, Artificial Sequence
  HTT spacer sequence TTCN PAM
ggcaggccucuuggcacaga

SEQ ID NO: 39673 - RNA, 20 nt, Artificial Sequence
  HTT spacer sequence TTCN PAM
cgcugugaccaccucaccuu

SEQ ID NO: 39674 - RNA, 20 nt, Artificial Sequence
  HTT spacer sequence TTCN PAM
gaagucgggguguggagacu

SEQ ID NO: 39675 - RNA, 20 nt, Artificial Sequence
  HTT spacer sequence TTCN PAM
gaaggugagguggucacagc

SEQ ID NO: 39676 - RNA, 20 nt, Artificial Sequence
  HTT spacer sequence TTCN PAM
ugcuggcacagacgccguac

SEQ ID NO: 39677 - RNA, 20 nt, Artificial Sequence
  HTT spacer sequence TTCN PAM
ccggcuuuccugcuggcaca

SEQ ID NO: 39678 - RNA, 20 nt, Artificial Sequence
  HTT spacer sequence TTCN PAM
caaacacuccguucucgcag

SEQ ID NO: 39679 - RNA, 20 nt, Artificial Sequence
  HTT spacer sequence TTCN PAM
cgcagccucacccuggggac

SEQ ID NO: 39680 - RNA, 20 nt, Artificial Sequence
  HTT spacer sequence TTCN PAM
ccugaacgcuggugguugcc

SEQ ID NO: 39681 - RNA, 20 nt, Artificial Sequence
  HTT spacer sequence TTCN PAM
ggagaagggagcgggaggau

SEQ ID NO: 39682 - RNA, 20 nt, Artificial Sequence
  HTT spacer sequence TTCN PAM
cccaaccauccugcguccca

SEQ ID NO: 39683 - RNA, 20 nt, Artificial Sequence
  HTT spacer sequence TTCN PAM
cucuucccuuccugaccacc

SEQ ID NO: 39684 - RNA, 20 nt, Artificial Sequence
  HTT spacer sequence TTCN PAM
cuuccugaccaccugccccc

SEQ ID NO: 39685 - RNA, 20 nt, Artificial Sequence
  HTT spacer sequence TTCN PAM
ugaccaccugcccccauccu

SEQ ID NO: 39686 - RNA, 20 nt, Artificial Sequence
  HTT spacer sequence TTCN PAM
ugcccgugcuaggggcagcu

SEQ ID NO: 39687 - RNA, 20 nt, Artificial Sequence
  HTT spacer sequence TTCN PAM
aucauuuuaauuauucaucu

SEQ ID NO: 39688 - RNA, 20 nt, Artificial Sequence
  HTT spacer sequence TTCN PAM
ucuguguuggugcuuuuguc

SEQ ID NO: 39689 - RNA, 20 nt, Artificial Sequence
  HTT spacer sequence TTCN PAM
cucaacagacagcucucgug

SEQ ID NO: 39690 - RNA, 20 nt, Artificial Sequence
  HTT spacer sequence TTCN PAM
gcagacaucagccagagcgu

SEQ ID NO: 39691 - RNA, 20 nt, Artificial Sequence
  HTT spacer sequence TTCN PAM
gugauuuuccuuuuagucgu

SEQ ID NO: 39692 - RNA, 20 nt, Artificial Sequence
  HTT spacer sequence TTCN PAM
uuuuagucgugaaaccuucu

SEQ ID NO: 39693 - RNA, 20 nt, Artificial Sequence
  HTT spacer sequence TTCN PAM
cgacuaaaaggaaaaucacu

SEQ ID NO: 39694 - RNA, 20 nt, Artificial Sequence
  HTT spacer sequence TTCN PAM
caaaaagcacacacaagcac

SEQ ID NO: 39695 - RNA, 20 nt, Artificial Sequence
  HTT spacer sequence TTCN PAM
gugcuugugugugcuuuuug

SEQ ID NO: 39696 - RNA, 20 nt, Artificial Sequence
  HTT spacer sequence TTCN PAM
gcuucugugcuugugugugc

SEQ ID NO: 39697 - RNA, 20 nt, Artificial Sequence
  HTT spacer sequence TTCN PAM
agugccuucacccaacacgc

SEQ ID NO: 39698 - RNA, 20 nt, Artificial Sequence
  HTT spacer sequence TTCN PAM
cccaacacgcgggccuuugg

SEQ ID NO: 39699 - RNA, 20 nt, Artificial Sequence
  HTT spacer sequence TTCN PAM
gccauggccaggucugagcu

SEQ ID NO: 39700 - RNA, 20 nt, Artificial Sequence
  HTT spacer sequence TTCN PAM
ggcuccaccugcagcuccac

SEQ ID NO: 39701 - RNA, 20 nt, Artificial Sequence
  HTT spacer sequence TTCN PAM
cucuccuagccuugugucuu

SEQ ID NO: 39702 - RNA, 20 nt, Artificial Sequence
  HTT spacer sequence TTCN PAM
ucucgccgguccuuguuagc

SEQ ID NO: 39703 - RNA, 20 nt, Artificial Sequence
  HTT spacer sequence TTCN PAM
cuaacaaggaccggcgagau

SEQ ID NO: 39704 - RNA, 20 nt, Artificial Sequence
  HTT spacer sequence TTCN PAM
ucuuuaaaauauaaaguaua

SEQ ID NO: 39705 - RNA, 20 nt, Artificial Sequence
  HTT spacer sequence TTCN PAM
cuuugucugauauuaauauu

SEQ ID NO: 39706 - RNA, 20 nt, Artificial Sequence
  HTT spacer sequence TTCN PAM
uuuuauugcuuuuucacuuu

SEQ ID NO: 39707 - RNA, 20 nt, Artificial Sequence
  HTT spacer sequence TTCN PAM
gcaaaucucaugcuacuuuu

SEQ ID NO: 39708 - RNA, 20 nt, Artificial Sequence
  HTT spacer sequence TTCN PAM
guucugcaaaucucaugcua

SEQ ID NO: 39709 - RNA, 20 nt, Artificial Sequence
  HTT spacer sequence TTCN PAM
cccucggaguacuuacccau

SEQ ID NO: 39710 - RNA, 20 nt, Artificial Sequence
  HTT spacer sequence TTCN PAM
gaaaccaagagaucaagcug

SEQ ID NO: 39711 - RNA, 20 nt, Artificial Sequence
  HTT spacer sequence TTCN PAM
gaaaaagguguguaauaauu

SEQ ID NO: 39712 - RNA, 20 nt, Artificial Sequence
  HTT spacer sequence TTCN PAM
gcuugaucucuugguuucug

SEQ ID NO: 39713 - RNA, 20 nt, Artificial Sequence
  HTT spacer sequence TTCN PAM
cauacuuuguaaucuuacua

SEQ ID NO: 39714 - RNA, 20 nt, Artificial Sequence
  HTT spacer sequence TTCN PAM
auucacauacuuuguaaucu

SEQ ID NO: 39715 - RNA, 20 nt, Artificial Sequence
  HTT spacer sequence TTCN PAM
auuugguacaaagcucucua

SEQ ID NO: 39716 - RNA, 20 nt, Artificial Sequence
  HTT spacer sequence TTCN PAM
aaaguacguggaacauuuac

SEQ ID NO: 39717 - RNA, 20 nt, Artificial Sequence
  HTT spacer sequence TTCN PAM
acguacuuuagaaaaaaagu

SEQ ID NO: 39718 - RNA, 20 nt, Artificial Sequence
  HTT spacer sequence TTCN PAM
cuguaugcuauaauuuuuuu

SEQ ID NO: 39719 - RNA, 20 nt, Artificial Sequence
  HTT spacer sequence TTCN PAM
aauacacugcugucaggagc

SEQ ID NO: 39720 - RNA, 20 nt, Artificial Sequence
  HTT spacer sequence TTCN PAM
auucaaauacacugcuguca

SEQ ID NO: 39721 - RNA, 20 nt, Artificial Sequence
  HTT spacer sequence TTCN PAM
uuuuuguuaucauuuuauga

SEQ ID NO: 39722 - RNA, 20 nt, Artificial Sequence
  HTT spacer sequence TTCN PAM
uacauuuuaaaguuuaaaac

SEQ ID NO: 39723 - RNA, 20 nt, Artificial Sequence
  HTT spacer sequence TTCN PAM
aaauaauccaugggucaagg

SEQ ID NO: 39724 - RNA, 20 nt, Artificial Sequence
  HTT spacer sequence TTCN PAM
uugacccauggauuauuuag

SEQ ID NO: 39725 - RNA, 20 nt, Artificial Sequence
  HTT spacer sequence TTCN PAM
uccuugacccauggauuauu

SEQ ID NO: 39726 - RNA, 20 nt, Artificial Sequence
  HTT spacer sequence TTCN PAM
aaacuguaugauaacuccca

SEQ ID NO: 39727 - RNA, 20 nt, Artificial Sequence
  HTT spacer sequence TTCN PAM
auacuacacaucaucaccag

SEQ ID NO: 39728 - RNA, 20 nt, Artificial Sequence
  HTT spacer sequence TTCN PAM
acuggugaugauguguagua

SEQ ID NO: 39729 - RNA, 20 nt, Artificial Sequence
  HTT spacer sequence TTCN PAM
gugaaaaaauuguagcauua

SEQ ID NO: 39730 - RNA, 20 nt, Artificial Sequence
  HTT spacer sequence TTCN PAM
cugaaaaucacuuugauuau

SEQ ID NO: 39731 - RNA, 20 nt, Artificial Sequence
  HTT spacer sequence TTCN PAM
aauauauacauuuaaugcua

SEQ ID NO: 39732 - RNA, 20 nt, Artificial Sequence
  HTT spacer sequence TTCN PAM
aacuuuuuucuaauauauac

SEQ ID NO: 39733 - RNA, 20 nt, Artificial Sequence
  HTT spacer sequence TTCN PAM
uauauuuucaaacuuuuuuc

SEQ ID NO: 39734 - RNA, 20 nt, Artificial Sequence
  HTT spacer sequence TTCN PAM
acagaagcaaguacggaaaa

SEQ ID NO: 39735 - RNA, 20 nt, Artificial Sequence
  HTT spacer sequence TTCN PAM
guugaaaacuuauuuccuau

SEQ ID NO: 39736 - RNA, 20 nt, Artificial Sequence
  HTT spacer sequence TTCN PAM
guacuugcuucuguugaaaa

SEQ ID NO: 39737 - RNA, 20 nt, Artificial Sequence
  HTT spacer sequence TTCN PAM
uuuuuuccguacuugcuucu

SEQ ID NO: 39738 - RNA, 20 nt, Artificial Sequence
  HTT spacer sequence TTCN PAM
uuaauuugcauuuccuuuuu

SEQ ID NO: 39739 - RNA, 20 nt, Artificial Sequence
  HTT spacer sequence TTCN PAM
uuuccuuaauuugcauuucc

SEQ ID NO: 39740 - RNA, 20 nt, Artificial Sequence
  HTT spacer sequence TTCN PAM
gcauuuaucuucauuuccuu

SEQ ID NO: 39741 - RNA, 20 nt, Artificial Sequence
  HTT spacer sequence TTCN PAM
auuuugauaauuucugcauu

SEQ ID NO: 39742 - RNA, 20 nt, Artificial Sequence
  HTT spacer sequence TTCN PAM
uacuuuuaguuguauacugu

SEQ ID NO: 39743 - RNA, 20 nt, Artificial Sequence
  HTT spacer sequence TTCN PAM
ugauuauacuuuuguucaua

SEQ ID NO: 39744 - RNA, 20 nt, Artificial Sequence
  HTT spacer sequence TTCN PAM
ugggcccaagugauccuccu

SEQ ID NO: 39745 - RNA, 20 nt, Artificial Sequence
  HTT spacer sequence TTCN PAM
uuuuuuguagagaugguguu

SEQ ID NO: 39746 - RNA, 20 nt, Artificial Sequence
  HTT spacer sequence TTCN PAM
ucuuuuucuuuuuuuguaga

SEQ ID NO: 39747 - RNA, 20 nt, Artificial Sequence
  HTT spacer sequence TTCN PAM
ugauguuaucuuuguccucu

SEQ ID NO: 39748 - RNA, 20 nt, Artificial Sequence
  HTT spacer sequence TTCN PAM
uucuugauguuaucuuuguc

SEQ ID NO: 39749 - RNA, 20 nt, Artificial Sequence
  HTT spacer sequence TTCN PAM
uagucucuaacuguacuuag

SEQ ID NO: 39750 - RNA, 20 nt, Artificial Sequence
  HTT spacer sequence TTCN PAM
auuaacaacuuuauacugua

SEQ ID NO: 39751 - RNA, 20 nt, Artificial Sequence
  HTT spacer sequence TTCN PAM
uaaagauuguccgguuaauc

SEQ ID NO: 39752 - RNA, 20 nt, Artificial Sequence
  HTT spacer sequence TTCN PAM
uaggccaacuuugaucauuu

SEQ ID NO: 39753 - RNA, 20 nt, Artificial Sequence
  HTT spacer sequence TTCN PAM
ucuuaggccaacuuugauca

SEQ ID NO: 39754 - RNA, 20 nt, Artificial Sequence
  HTT spacer sequence TTCN PAM
acuucuucuuaggccaacuu

SEQ ID NO: 39755 - RNA, 20 nt, Artificial Sequence
  HTT spacer sequence TTCN PAM
aaaucauuuuugccuauguu

SEQ ID NO: 39756 - RNA, 20 nt, Artificial Sequence
  HTT spacer sequence TTCN PAM
uuucuuacacuacauuacau

SEQ ID NO: 39757 - RNA, 20 nt, Artificial Sequence
  HTT spacer sequence TTCN PAM
uacacuacauuacaugccua

SEQ ID NO: 39758 - RNA, 20 nt, Artificial Sequence
  HTT spacer sequence TTCN PAM
aaguguuuuccuccaggagc

SEQ ID NO: 39759 - RNA, 20 nt, Artificial Sequence
  HTT spacer sequence TTCN PAM
uccaggagccaggcuauugg

SEQ ID NO: 39760 - RNA, 20 nt, Artificial Sequence
  HTT spacer sequence TTCN PAM
uaaauggggcacugcaggcc

SEQ ID NO: 39761 - RNA, 20 nt, Artificial Sequence
  HTT spacer sequence TTCN PAM
cucggccacaaggccugcag

SEQ ID NO: 39762 - RNA, 20 nt, Artificial Sequence
  HTT spacer sequence TTCN PAM
gcccugccgucuuuucccuc

SEQ ID NO: 39763 - RNA, 20 nt, Artificial Sequence
  HTT spacer sequence TTCN PAM
cauucauuggccaaagcaua

SEQ ID NO: 39764 - RNA, 20 nt, Artificial Sequence
  HTT spacer sequence TTCN PAM
uuggccaaagcauaacacau

SEQ ID NO: 39765 - RNA, 20 nt, Artificial Sequence
  HTT spacer sequence TTCN PAM
uauaaagcugggauaauaac

SEQ ID NO: 39766 - RNA, 20 nt, Artificial Sequence
  HTT spacer sequence TTCN PAM
cacgcugucccugugaaguc

SEQ ID NO: 39767 - RNA, 20 nt, Artificial Sequence
  HTT spacer sequence TTCN PAM
cagggacagcgugagaacuc

SEQ ID NO: 39768 - RNA, 20 nt, Artificial Sequence
  HTT spacer sequence TTCN PAM
ucacugggcaagacacuccc

SEQ ID NO: 39769 - RNA, 20 nt, Artificial Sequence
  HTT spacer sequence TTCN PAM
agagucacacuguuuggauc

SEQ ID NO: 39770 - RNA, 20 nt, Artificial Sequence
  HTT spacer sequence TTCN PAM
cggcgugguuccagagucac

SEQ ID NO: 39771 - RNA, 20 nt, Artificial Sequence
  HTT spacer sequence TTCN PAM
aggagguggauccucagccu

SEQ ID NO: 39772 - RNA, 20 nt, Artificial Sequence
  HTT spacer sequence TTCN PAM
caggugcugacgggaugucu

SEQ ID NO: 39773 - RNA, 20 nt, Artificial Sequence
  HTT spacer sequence TTCN PAM
cacgauucacaggugcugac

SEQ ID NO: 39774 - RNA, 20 nt, Artificial Sequence
  HTT spacer sequence TTCN PAM
uaaaaccgggugggcaaguu

SEQ ID NO: 39775 - RNA, 20 nt, Artificial Sequence
  HTT spacer sequence TTCN PAM
cuuccuaaaaccgggugggc

SEQ ID NO: 39776 - RNA, 20 nt, Artificial Sequence
  HTT spacer sequence TTCN PAM
gcccauucucuuccuaaaac

SEQ ID NO: 39777 - RNA, 20 nt, Artificial Sequence
  HTT spacer sequence TTCN PAM
ccauggaggagagcccugcc

SEQ ID NO: 39778 - RNA, 20 nt, Artificial Sequence
  HTT spacer sequence TTCN PAM
ccuugcugacuguggagagg

SEQ ID NO: 39779 - RNA, 20 nt, Artificial Sequence
  HTT spacer sequence TTCN PAM
cagggguggagcuggggcuc

SEQ ID NO: 39780 - RNA, 20 nt, Artificial Sequence
  HTT spacer sequence TTCN PAM
aaaaaucuggucaccaugcu

SEQ ID NO: 39781 - RNA, 20 nt, Artificial Sequence
  HTT spacer sequence TTCN PAM
gauaucaaacaaucaaacuu

SEQ ID NO: 39782 - RNA, 20 nt, Artificial Sequence
  HTT spacer sequence TTCN PAM
cauaauuuuaauaauaaaua

SEQ ID NO: 39783 - RNA, 20 nt, Artificial Sequence
  HTT spacer sequence TTCN PAM
gugucuuguguuaccucuuu

SEQ ID NO: 39784 - RNA, 20 nt, Artificial Sequence
  HTT spacer sequence TTCN PAM
uccuucccugaagccugguc

SEQ ID NO: 39785 - RNA, 20 nt, Artificial Sequence
  HTT spacer sequence TTCN PAM
cugaagccugguccucuggc

SEQ ID NO: 39786 - RNA, 20 nt, Artificial Sequence
  HTT spacer sequence TTCN PAM
gggaaggaggaagggccuga

SEQ ID NO: 39787 - RNA, 20 nt, Artificial Sequence
  HTT spacer sequence TTCN PAM
uccucucuaucccuggacuc

SEQ ID NO: 39788 - RNA, 20 nt, Artificial Sequence
  HTT spacer sequence TTCN PAM
guggaagcacagguccccag

SEQ ID NO: 39789 - RNA, 20 nt, Artificial Sequence
  HTT spacer sequence TTCN PAM
acugaaagaguccagggaua

SEQ ID NO: 39790 - RNA, 20 nt, Artificial Sequence
  HTT spacer sequence TTCN PAM
guuuucuguguggguggccc

SEQ ID NO: 39791 - RNA, 20 nt, Artificial Sequence
  HTT spacer sequence TTCN PAM
guguggguggccccaccuug

SEQ ID NO: 39792 - RNA, 20 nt, Artificial Sequence
  HTT spacer sequence TTCN PAM
cucaagccaagguggggcca

SEQ ID NO: 39793 - RNA, 20 nt, Artificial Sequence
  HTT spacer sequence TTCN PAM
ucaugaggucagcauuuggg

SEQ ID NO: 39794 - RNA, 20 nt, Artificial Sequence
  HTT spacer sequence TTCN PAM
gcauuggguggcguccucug

SEQ ID NO: 39795 - RNA, 20 nt, Artificial Sequence
  HTT spacer sequence TTCN PAM
gguuguggcuuggccccacc

SEQ ID NO: 39796 - RNA, 20 nt, Artificial Sequence
  HTT spacer sequence TTCN PAM
gaccuucugguuguggcuug

SEQ ID NO: 39797 - RNA, 20 nt, Artificial Sequence
  HTT spacer sequence TTCN PAM
uguguggccacuggcacaag

SEQ ID NO: 39798 - RNA, 20 nt, Artificial Sequence
  HTT spacer sequence TTCN PAM
ugugccaguggccacacagg

SEQ ID NO: 39799 - RNA, 20 nt, Artificial Sequence
  HTT spacer sequence TTCN PAM
auucuugugccaguggccac

SEQ ID NO: 39800 - RNA, 20 nt, Artificial Sequence
  HTT spacer sequence TTCN PAM
ucuauucuugugccaguggc

SEQ ID NO: 39801 - RNA, 20 nt, Artificial Sequence
  HTT spacer sequence TTCN PAM
ucuucuauucuugugccagu

SEQ ID NO: 39802 - RNA, 20 nt, Artificial Sequence
  HTT spacer sequence TTCN PAM
ucaaaaugaaguaagucagu

SEQ ID NO: 39803 - RNA, 20 nt, Artificial Sequence
  HTT spacer sequence TTCN PAM
uuuugaugaauaaaauauuu

SEQ ID NO: 39804 - RNA, 20 nt, Artificial Sequence
  HTT spacer sequence TTCN PAM
caaaggaauuaaccacuaaa

SEQ ID NO: 39805 - RNA, 20 nt, Artificial Sequence
  HTT spacer sequence TTCN PAM
uuugugaaacugacuuacuu

SEQ ID NO: 39806 - RNA, 20 nt, Artificial Sequence
  HTT spacer sequence TTCN PAM
cauuacucauuuagugguua

SEQ ID NO: 39807 - RNA, 20 nt, Artificial Sequence
  HTT spacer sequence TTCN PAM
gcucaaguaagcauaauaaa

SEQ ID NO: 39808 - RNA, 20 nt, Artificial Sequence
  HTT spacer sequence TTCN PAM
uuuauuaugcuuacuugagc

SEQ ID NO: 39809 - RNA, 20 nt, Artificial Sequence
  HTT spacer sequence TTCN PAM
aagaucaacccuaacugacu

SEQ ID NO: 39810 - RNA, 20 nt, Artificial Sequence
  HTT spacer sequence TTCN PAM
gugucuuuucuuggagcauc

SEQ ID NO: 39811 - RNA, 20 nt, Artificial Sequence
  HTT spacer sequence TTCN PAM
uggagcauccugagggcucc

SEQ ID NO: 39812 - RNA, 20 nt, Artificial Sequence
  HTT spacer sequence TTCN PAM
aggcuuagagcuaccaacua

SEQ ID NO: 39813 - RNA, 20 nt, Artificial Sequence
  HTT spacer sequence TTCN PAM
gagugacaagugacauaauu

SEQ ID NO: 39814 - RNA, 20 nt, Artificial Sequence
  HTT spacer sequence TTCN PAM
cucgucuuugcacaucgccu

SEQ ID NO: 39815 - RNA, 20 nt, Artificial Sequence
  HTT spacer sequence TTCN PAM
cacacugaccuucgcaggag

SEQ ID NO: 39816 - RNA, 20 nt, Artificial Sequence
  HTT spacer sequence TTCN PAM
caggagccgcucugcucacu

SEQ ID NO: 39817 - RNA, 20 nt, Artificial Sequence
  HTT spacer sequence TTCN PAM
cccccgccuguuggcauuuc

SEQ ID NO: 39818 - RNA, 20 nt, Artificial Sequence
  HTT spacer sequence TTCN PAM
cucuccagaaggacuuggug

SEQ ID NO: 39819 - RNA, 20 nt, Artificial Sequence
  HTT spacer sequence TTCN PAM
ggagagugaaaugccaacag

SEQ ID NO: 39820 - RNA, 20 nt, Artificial Sequence
  HTT spacer sequence TTCN PAM
gacguagagaguuuguuuug

SEQ ID NO: 39821 - RNA, 20 nt, Artificial Sequence
  HTT spacer sequence TTCN PAM
ggcagagcccagcaaaacaa

SEQ ID NO: 39822 - RNA, 20 nt, Artificial Sequence
  HTT spacer sequence TTCN PAM
aguacugacuccaggaaaga

SEQ ID NO: 39823 - RNA, 20 nt, Artificial Sequence
  HTT spacer sequence TTCN PAM
uggagucaguacuagaaacg

SEQ ID NO: 39824 - RNA, 20 nt, Artificial Sequence
  HTT spacer sequence TTCN PAM
gggucuuuccuggagucagu

SEQ ID NO: 39825 - RNA, 20 nt, Artificial Sequence
  HTT spacer sequence TTCN PAM
gauuucuccuguuugggccc

SEQ ID NO: 39826 - RNA, 20 nt, Artificial Sequence
  HTT spacer sequence TTCN PAM
ccuguuugggcccacauuuc

SEQ ID NO: 39827 - RNA, 20 nt, Artificial Sequence
  HTT spacer sequence TTCN PAM
ucuggcccucugagguaacg

SEQ ID NO: 39828 - RNA, 20 nt, Artificial Sequence
  HTT spacer sequence TTCN PAM
ggcccucugagguaacggga

SEQ ID NO: 39829 - RNA, 20 nt, Artificial Sequence
  HTT spacer sequence TTCN PAM
cguuaccucagagggccaga

SEQ ID NO: 39830 - RNA, 20 nt, Artificial Sequence
  HTT spacer sequence TTCN PAM
gggcugaccgugagucuggc

SEQ ID NO: 39831 - RNA, 20 nt, Artificial Sequence
  HTT spacer sequence TTCN PAM
ccauggugaggucccgguau

SEQ ID NO: 39832 - RNA, 20 nt, Artificial Sequence
  HTT spacer sequence TTCN PAM
augaccugccugggcugaca

SEQ ID NO: 39833 - RNA, 20 nt, Artificial Sequence
  HTT spacer sequence TTCN PAM
ucuguaaaaugggcugauug

SEQ ID NO: 39834 - RNA, 20 nt, Artificial Sequence
  HTT spacer sequence TTCN PAM
gaggaggugcuauuccagau

SEQ ID NO: 39835 - RNA, 20 nt, Artificial Sequence
  HTT spacer sequence TTCN PAM
agaucccuguuuucuaaccc

SEQ ID NO: 39836 - RNA, 20 nt, Artificial Sequence
  HTT spacer sequence TTCN PAM
aacccucagcaggcucugcu

SEQ ID NO: 39837 - RNA, 20 nt, Artificial Sequence
  HTT spacer sequence TTCN PAM
ugcccgacauguccuccuuc

SEQ ID NO: 39838 - RNA, 20 nt, Artificial Sequence
  HTT spacer sequence TTCN PAM
uccgcaagccagccccucac

SEQ ID NO: 39839 - RNA, 20 nt, Artificial Sequence
  HTT spacer sequence TTCN PAM
acuguguccccacccaaauc

SEQ ID NO: 39840 - RNA, 20 nt, Artificial Sequence
  HTT spacer sequence TTCN PAM
ggccugcccauaggaugccu

SEQ ID NO: 39841 - RNA, 20 nt, Artificial Sequence
  HTT spacer sequence TTCN PAM
acccaugccuuacuggccag

SEQ ID NO: 39842 - RNA, 20 nt, Artificial Sequence
  HTT spacer sequence TTCN PAM
ggccaguaaggcaugggugg

SEQ ID NO: 39843 - RNA, 20 nt, Artificial Sequence
  HTT spacer sequence TTCN PAM
caguaccaccaccccgcccc

SEQ ID NO: 39844 - RNA, 20 nt, Artificial Sequence
  HTT spacer sequence TTCN PAM
cucccacacaccaggccacu

SEQ ID NO: 39845 - RNA, 20 nt, Artificial Sequence
  HTT spacer sequence TTCN PAM
aaggggaugauggggaccag

SEQ ID NO: 39846 - RNA, 20 nt, Artificial Sequence
  HTT spacer sequence TTCN PAM
aaggugauuccaaggggaug

SEQ ID NO: 39847 - RNA, 20 nt, Artificial Sequence
  HTT spacer sequence TTCN PAM
aaaugauccaggguuuucca

SEQ ID NO: 39848 - RNA, 20 nt, Artificial Sequence
  HTT spacer sequence TTCN PAM
accuugauacugugaugagc

SEQ ID NO: 39849 - RNA, 20 nt, Artificial Sequence
  HTT spacer sequence TTCN PAM
ucuucuaccuugauacugug

SEQ ID NO: 39850 - RNA, 20 nt, Artificial Sequence
  HTT spacer sequence TTCN PAM
gccaccaugugaucuuacug

SEQ ID NO: 39851 - RNA, 20 nt, Artificial Sequence
  HTT spacer sequence TTCN PAM
aaggagcccacagucucagg

SEQ ID NO: 39852 - RNA, 20 nt, Artificial Sequence
  HTT spacer sequence TTCN PAM
ggauguggcucuguuuucac

SEQ ID NO: 39853 - RNA, 20 nt, Artificial Sequence
  HTT spacer sequence TTCN PAM
cugccuaccagcucuccagc

SEQ ID NO: 39854 - RNA, 20 nt, Artificial Sequence
  HTT spacer sequence TTCN PAM
ccuugguucuuggagaccug

SEQ ID NO: 39855 - RNA, 20 nt, Artificial Sequence
  HTT spacer sequence TTCN PAM
uggagaccugauuugcuucc

SEQ ID NO: 39856 - RNA, 20 nt, Artificial Sequence
  HTT spacer sequence TTCN PAM
aaucaaccccuuccuacuca

SEQ ID NO: 39857 - RNA, 20 nt, Artificial Sequence
  HTT spacer sequence TTCN PAM
uacucaguggccagccuauu

SEQ ID NO: 39858 - RNA, 20 nt, Artificial Sequence
  HTT spacer sequence TTCN PAM
ccauuugcaaccagcaaccc

SEQ ID NO: 39859 - RNA, 20 nt, Artificial Sequence
  HTT spacer sequence TTCN PAM
ggggaaacuucuggcuauaa

SEQ ID NO: 39860 - RNA, 20 nt, Artificial Sequence
  HTT spacer sequence TTCN PAM
ccagaaguuauagccagggu

SEQ ID NO: 39861 - RNA, 20 nt, Artificial Sequence
  HTT spacer sequence TTCN PAM
ggcuauaacuucugaggcac

SEQ ID NO: 39862 - RNA, 20 nt, Artificial Sequence
  HTT spacer sequence TTCN PAM
gaggcacggagcggggcagg

SEQ ID NO: 39863 - RNA, 20 nt, Artificial Sequence
  HTT spacer sequence TTCN PAM
ugcaggaggaggagguggcc

SEQ ID NO: 39864 - RNA, 20 nt, Artificial Sequence
  HTT spacer sequence TTCN PAM
uccaccuuucagcagcccug

SEQ ID NO: 39865 - RNA, 20 nt, Artificial Sequence
  HTT spacer sequence TTCN PAM
gcagcccuggagccgcaugg

SEQ ID NO: 39866 - RNA, 20 nt, Artificial Sequence
  HTT spacer sequence TTCN PAM
cugcuccaugcggcuccagg

SEQ ID NO: 39867 - RNA, 20 nt, Artificial Sequence
  HTT spacer sequence TTCN PAM
aggcugugugggagcaggug

SEQ ID NO: 39868 - RNA, 20 nt, Artificial Sequence
  HTT spacer sequence TTCN PAM
ugagugcuggcccgggccca

SEQ ID NO: 39869 - RNA, 20 nt, Artificial Sequence
  HTT spacer sequence TTCN PAM
ugcuccccacacaucccagg

SEQ ID NO: 39870 - RNA, 20 nt, Artificial Sequence
  HTT spacer sequence TTCN PAM
gcggaaggcggcugguggcu

SEQ ID NO: 39871 - RNA, 20 nt, Artificial Sequence
  HTT spacer sequence TTCN PAM
gcagaacaguugcuggguca

SEQ ID NO: 39872 - RNA, 20 nt, Artificial Sequence
  HTT spacer sequence TTCN PAM
gcuuccugggccuggugucc

SEQ ID NO: 39873 - RNA, 20 nt, Artificial Sequence
  HTT spacer sequence TTCN PAM
ugggccuggugucccccgcc

SEQ ID NO: 39874 - RNA, 20 nt, Artificial Sequence
  HTT spacer sequence TTCN PAM
gugaugucuugucagggccu

SEQ ID NO: 39875 - RNA, 20 nt, Artificial Sequence
  HTT spacer sequence TTCN PAM
auuugcuccucagugcgagg

SEQ ID NO: 39876 - RNA, 20 nt, Artificial Sequence
  HTT spacer sequence TTCN PAM
ucccauccagacccuaggcu

SEQ ID NO: 39877 - RNA, 20 nt, Artificial Sequence
  HTT spacer sequence TTCN PAM
uuucaucccauccagacccu

SEQ ID NO: 39878 - RNA, 20 nt, Artificial Sequence
  HTT spacer sequence TTCN PAM
uucuucucccccgagaaccg

SEQ ID NO: 39879 - RNA, 20 nt, Artificial Sequence
  HTT spacer sequence TTCN PAM
ucucccccgagaaccgucag

SEQ ID NO: 39880 - RNA, 20 nt, Artificial Sequence
  HTT spacer sequence TTCN PAM
cccccgagaaccgucagccc

SEQ ID NO: 39881 - RNA, 20 nt, Artificial Sequence
  HTT spacer sequence TTCN PAM
cgggggagaagaaggaaggg

SEQ ID NO: 39882 - RNA, 20 nt, Artificial Sequence
  HTT spacer sequence TTCN PAM
agggugccaucgccccuccc

SEQ ID NO: 39883 - RNA, 20 nt, Artificial Sequence
  HTT spacer sequence TTCN PAM
cguaucugcugggugucccc

SEQ ID NO: 39884 - RNA, 20 nt, Artificial Sequence
  HTT spacer sequence TTCN PAM
gcagagaggccaugugcuuu

SEQ ID NO: 39885 - RNA, 20 nt, Artificial Sequence
  HTT spacer sequence TTCN PAM
ucugcagagaggccaugugc

SEQ ID NO: 39886 - RNA, 20 nt, Artificial Sequence
  HTT spacer sequence TTCN PAM
ggacucccccuccuugaccc

SEQ ID NO: 39887 - RNA, 20 nt, Artificial Sequence
  HTT spacer sequence TTCN PAM
gcccccaucccaggcaagag

SEQ ID NO: 39888 - RNA, 20 nt, Artificial Sequence
  HTT spacer sequence TTCN PAM
cauuaaaagccugcagggac

SEQ ID NO: 39889 - RNA, 20 nt, Artificial Sequence
  HTT spacer sequence TTCN PAM
guucccauuaaaagccugca

SEQ ID NO: 39890 - RNA, 20 nt, Artificial Sequence
  HTT spacer sequence TTCN PAM
uccauuucuguucccauuaa

SEQ ID NO: 39891 - RNA, 20 nt, Artificial Sequence
  HTT spacer sequence TTCN PAM
cccacacugaggugaccccu

SEQ ID NO: 39892 - RNA, 20 nt, Artificial Sequence
  HTT spacer sequence TTCN PAM
cagacuggcaucugccccua

SEQ ID NO: 39893 - RNA, 20 nt, Artificial Sequence
  HTT spacer sequence TTCN PAM
aacaauccggcuucccagac

SEQ ID NO: 39894 - RNA, 20 nt, Artificial Sequence
  HTT spacer sequence TTCN PAM
aaaagcagagacaaccaccu

SEQ ID NO: 39895 - RNA, 20 nt, Artificial Sequence
  HTT spacer sequence TTCN PAM
uuuucaaaaagcagagacaa

SEQ ID NO: 39896 - RNA, 20 nt, Artificial Sequence
  HTT spacer sequence TTCN PAM
ccugcgggcggcucccccac

SEQ ID NO: 39897 - RNA, 20 nt, Artificial Sequence
  HTT spacer sequence TTCN PAM
aaauagcucgcagggcccug

SEQ ID NO: 39898 - RNA, 20 nt, Artificial Sequence
  HTT spacer sequence TTCN PAM
gcgccgccgcgcucgccccg

SEQ ID NO: 39899 - RNA, 20 nt, Artificial Sequence
  HTT spacer sequence TTCN PAM
gucaugguuccgcgccgccg

SEQ ID NO: 39900 - RNA, 20 nt, Artificial Sequence
  HTT spacer sequence TTCN PAM
ugccgucccgcagcuugacc

SEQ ID NO: 39901 - RNA, 20 nt, Artificial Sequence
  HTT spacer sequence TTCN PAM
acugcggggacaggggggag

SEQ ID NO: 39902 - RNA, 20 nt, Artificial Sequence
  HTT spacer sequence TTCN PAM
gcagcaccagccaccuacuc

SEQ ID NO: 39903 - RNA, 20 nt, Artificial Sequence
  HTT spacer sequence TTCN PAM
cggcggggugacagcggcgg

SEQ ID NO: 39904 - RNA, 20 nt, Artificial Sequence
  HTT spacer sequence TTCN PAM
guccagggcccccaccugcg

SEQ ID NO: 39905 - RNA, 20 nt, Artificial Sequence
  HTT spacer sequence TTCN PAM
uccguccagggcccccaccu

SEQ ID NO: 39906 - RNA, 20 nt, Artificial Sequence
  HTT spacer sequence TTCN PAM
agcagggcagacugaggccc

SEQ ID NO: 39907 - RNA, 20 nt, Artificial Sequence
  HTT spacer sequence TTCN PAM
ggggggccccuugcugcucu

SEQ ID NO: 39908 - RNA, 20 nt, Artificial Sequence
  HTT spacer sequence TTCN PAM
acaagcacagcucaacccuc

SEQ ID NO: 39909 - RNA, 20 nt, Artificial Sequence
  HTT spacer sequence TTCN PAM
ggggcccugcucugagcguu

SEQ ID NO: 39910 - RNA, 20 nt, Artificial Sequence
  HTT spacer sequence TTCN PAM
cccagcaauguggcagucac

SEQ ID NO: 39911 - RNA, 20 nt, Artificial Sequence
  HTT spacer sequence TTCN PAM
uccaggaccaccugaggccc

SEQ ID NO: 39912 - RNA, 20 nt, Artificial Sequence
  HTT spacer sequence TTCN PAM
ugccugccuccgccuccccu

SEQ ID NO: 39913 - RNA, 20 nt, Artificial Sequence
  HTT spacer sequence TTCN PAM
ccacucagcccuccgugccc

SEQ ID NO: 39914 - RNA, 20 nt, Artificial Sequence
  HTT spacer sequence TTCN PAM
uauaccagguccccugcagc

SEQ ID NO: 39915 - RNA, 20 nt, Artificial Sequence
  HTT spacer sequence TTCN PAM
ugggaugcggccucucugga

SEQ ID NO: 39916 - RNA, 20 nt, Artificial Sequence
  HTT spacer sequence TTCN PAM
cccccgacacuccucuuugg

SEQ ID NO: 39917 - RNA, 20 nt, Artificial Sequence
  HTT spacer sequence TTCN PAM
uucugcaucagacaguccca

SEQ ID NO: 39918 - RNA, 20 nt, Artificial Sequence
  HTT spacer sequence TTCN PAM
gcaucagacagucccaggag

SEQ ID NO: 39919 - RNA, 20 nt, Artificial Sequence
  HTT spacer sequence TTCN PAM
ccuacagacucacagauugu

SEQ ID NO: 39920 - RNA, 20 nt, Artificial Sequence
  HTT spacer sequence TTCN PAM
ggggcuggcgugggagguga

SEQ ID NO: 39921 - RNA, 20 nt, Artificial Sequence
  HTT spacer sequence TTCN PAM
acuaccccacaucaccuccc

SEQ ID NO: 39922 - RNA, 20 nt, Artificial Sequence
  HTT spacer sequence TTCN PAM
uuccaagccuugaggccagg

SEQ ID NO: 39923 - RNA, 20 nt, Artificial Sequence
  HTT spacer sequence TTCN PAM
aagccuugaggccagguguc

SEQ ID NO: 39924 - RNA, 20 nt, Artificial Sequence
  HTT spacer sequence TTCN PAM
guguuggucacuccagcagc

SEQ ID NO: 39925 - RNA, 20 nt, Artificial Sequence
  HTT spacer sequence TTCN PAM
acccugggcugcuggaguga

SEQ ID NO: 39926 - RNA, 20 nt, Artificial Sequence
  HTT spacer sequence TTCN PAM
cacgcccaccuccccacccu

SEQ ID NO: 39927 - RNA, 20 nt, Artificial Sequence
  HTT spacer sequence TTCN PAM
ccuggccccucauaagccuc

SEQ ID NO: 39928 - RNA, 20 nt, Artificial Sequence
  HTT spacer sequence TTCN PAM
cccagcugccuucccgcuca

SEQ ID NO: 39929 - RNA, 20 nt, Artificial Sequence
  HTT spacer sequence TTCN PAM
cgcucagcgcuggagaccac

SEQ ID NO: 39930 - RNA, 20 nt, Artificial Sequence
  HTT spacer sequence TTCN PAM
ucucucccucacaccaggag

SEQ ID NO: 39931 - RNA, 20 nt, Artificial Sequence
  HTT spacer sequence TTCN PAM
uuguaagacaggcaggguuc

SEQ ID NO: 39932 - RNA, 20 nt, Artificial Sequence
  HTT spacer sequence TTCN PAM
uuuuguuaccaguggugauu

SEQ ID NO: 39933 - RNA, 20 nt, Artificial Sequence
  HTT spacer sequence TTCN PAM
uucugggaagggccccgaug

SEQ ID NO: 39934 - RNA, 20 nt, Artificial Sequence
  HTT spacer sequence TTCN PAM
gggaagggccccgaugugca

SEQ ID NO: 39935 - RNA, 20 nt, Artificial Sequence
  HTT spacer sequence TTCN PAM
cagaaggaaaucaccacugg

SEQ ID NO: 39936 - RNA, 20 nt, Artificial Sequence
  HTT spacer sequence TTCN PAM
acuggcaccuuucuccuccu

SEQ ID NO: 39937 - RNA, 20 nt, Artificial Sequence
  HTT spacer sequence TTCN PAM
ccuccuugcguuuuucucaa

SEQ ID NO: 39938 - RNA, 20 nt, Artificial Sequence
  HTT spacer sequence TTCN PAM
caaucgugagcacgucuuuc

SEQ ID NO: 39939 - RNA, 20 nt, Artificial Sequence
  HTT spacer sequence TTCN PAM
guuaugacaagguuuagcga

SEQ ID NO: 39940 - RNA, 20 nt, Artificial Sequence
  HTT spacer sequence TTCN PAM
cuaaaccuugucauaacaga

SEQ ID NO: 39941 - RNA, 20 nt, Artificial Sequence
  HTT spacer sequence TTCN PAM
uucgcuaaaccuugucauaa

SEQ ID NO: 39942 - RNA, 20 nt, Artificial Sequence
  HTT spacer sequence TTCN PAM
cuuucauucgcuaaaccuug

SEQ ID NO: 39943 - RNA, 20 nt, Artificial Sequence
  HTT spacer sequence TTCN PAM
ucaaugucuccaccgcgucc

SEQ ID NO: 39944 - RNA, 20 nt, Artificial Sequence
  HTT spacer sequence TTCN PAM
gcagugaggacgcgguggag

SEQ ID NO: 39945 - RNA, 20 nt, Artificial Sequence
  HTT spacer sequence TTCN PAM
uccucccaggugcgggggcu

SEQ ID NO: 39946 - RNA, 20 nt, Artificial Sequence
  HTT spacer sequence TTCN PAM
ucccaggugcgggggcuggg

SEQ ID NO: 39947 - RNA, 20 nt, Artificial Sequence
  HTT spacer sequence TTCN PAM
ucaccacccccagcccccgc

SEQ ID NO: 39948 - RNA, 20 nt, Artificial Sequence
  HTT spacer sequence TTCN PAM
ugacauccuguggagagugu

SEQ ID NO: 39949 - RNA, 20 nt, Artificial Sequence
  HTT spacer sequence TTCN PAM
cacaggggcugccccugggg

SEQ ID NO: 39950 - RNA, 20 nt, Artificial Sequence
  HTT spacer sequence TTCN PAM
uccagcucagaaaagccacc

SEQ ID NO: 39951 - RNA, 20 nt, Artificial Sequence
  HTT spacer sequence TTCN PAM
gagcuggaugaagcccccag

SEQ ID NO: 39952 - RNA, 20 nt, Artificial Sequence
  HTT spacer sequence TTCN PAM
ccccaccauggugacuccaa

SEQ ID NO: 39953 - RNA, 20 nt, Artificial Sequence
  HTT spacer sequence TTCN PAM
gcuuccccccaccaugguga

SEQ ID NO: 39954 - RNA, 20 nt, Artificial Sequence
  HTT spacer sequence TTCN PAM
gaguuucagcuuccccccac

SEQ ID NO: 39955 - RNA, 20 nt, Artificial Sequence
  HTT spacer sequence TTCN PAM
ccccagccagcccaaaccuu

SEQ ID NO: 39956 - RNA, 20 nt, Artificial Sequence
  HTT spacer sequence TTCN PAM
agccagcuguggggggcaag

SEQ ID NO: 39957 - RNA, 20 nt, Artificial Sequence
  HTT spacer sequence TTCN PAM
gcgccugcccccgggcugau

SEQ ID NO: 39958 - RNA, 20 nt, Artificial Sequence
  HTT spacer sequence TTCN PAM
ugagcagagccuccuggugg

SEQ ID NO: 39959 - RNA, 20 nt, Artificial Sequence
  HTT spacer sequence TTCN PAM
ugugcgucuggcuccugccc

SEQ ID NO: 39960 - RNA, 20 nt, Artificial Sequence
  HTT spacer sequence TTCN PAM
gcccggagcugggaugucag

SEQ ID NO: 39961 - RNA, 20 nt, Artificial Sequence
  HTT spacer sequence TTCN PAM
auggggagaggauaacuggc

SEQ ID NO: 39962 - RNA, 20 nt, Artificial Sequence
  HTT spacer sequence TTCN PAM
ugauguuucuauggggagag

SEQ ID NO: 39963 - RNA, 20 nt, Artificial Sequence
  HTT spacer sequence TTCN PAM
cucagcccccgcgucaggac

SEQ ID NO: 39964 - RNA, 20 nt, Artificial Sequence
  HTT spacer sequence TTCN PAM
cuguccugacgcgggggcug

SEQ ID NO: 39965 - RNA, 20 nt, Artificial Sequence
  HTT spacer sequence TTCN PAM
gcucucagcuccacaugugg

SEQ ID NO: 39966 - RNA, 20 nt, Artificial Sequence
  HTT spacer sequence TTCN PAM
ccgccugcguccucgucuac

SEQ ID NO: 39967 - protein, 84 aa, Artificial Sequence
  chloroplast transit peptide
MASMISSSAVTTVSRASRGQSAAMAPFGGLKSMTGFPVRKVNTDITSITSNGGRVKCMQVWPPIGKKKFETLSYLPPLTRDSRA

SEQ ID NO: 39968 - protein, 85 aa, Artificial Sequence
  chloroplast transit peptide
MASSMLSSATMVASPAQATMVAPFNGLKSSAAFPATRKANNDITSITSNGGRVNCMQVWPPIEKKKFETLSYLPDLTDSGGRVNC

SEQ ID NO: 39969 - protein, 76 aa, Artificial Sequence
  chloroplast transit peptide
MAQVSRICNGVQNPSLISNLSKSSQRKSPLSVSLKTQQHPRAYPISSSWGLKKSGMTLIGSELRPLKVMSSVSTAC

SEQ ID NO: 39970 - protein, 76 aa, Artificial Sequence
  chloroplast transit peptide
MAQVSRICNGVWNPSLISNLSKSSQRKSPLSVSLKTQQHPRAYPISSSWGLKKSGMTLIGSELRPLKVMSSVSTAC

SEQ ID NO: 39971 - protein, 72 aa, Artificial Sequence
  chloroplast transit peptide
MAQINNMAQGIQTLNPNSNFHKPQVPKSSSFLVFGSKKLKNSANSMLVLKKDSIFMQLFCSFRISASVATAC

SEQ ID NO: 39972 - protein, 69 aa, Artificial Sequence
  chloroplast transit peptide
MAALVTSQLATSGTVLSVTDRFRRPGFQGLRPRNPADAALGMRTVGASAAPKQSRKPHRFDRRCLSMVV

SEQ ID NO: 39973 - protein, 77 aa, Artificial Sequence
  chloroplast transit peptide
MAALTTSQLATSATGFGIADRSAPSSLLRHGFQGLKPRSPAGGDATSLSVTTSARATPKQQRSVQRGSRRFPSVVVC

SEQ ID NO: 39974 - protein, 57 aa, Artificial Sequence
  chloroplast transit peptide
MASSVLSSAAVATRSNVAQANMVAPFTGLKSAASFPVSRKQNLDITSIASNGGRVQC

SEQ ID NO: 39975 - protein, 65 aa, Artificial Sequence
  chloroplast transit peptide
MESLAATSVFAPSRVAVPAARALVRAGTVVPTRRTSSTSGTSGVKCSAAVTPQASPVISRSAAAA

SEQ ID NO: 39976 - protein, 72 aa, Artificial Sequence
  chloroplast transit peptide
MGAAATSMQSLKFSNRLVPPSRRLSPVPNNVTCNNLPKSAAPVRTVKCCASSWNSTINGAAATTNGASAASS

SEQ ID NO: 39977 - protein, 20 aa, Artificial Sequence
  endosomal escape peptide
  MISC_FEATURE (4)..(4): Xaa is Lys, His or Arg
  MISC_FEATURE (8)..(8): Xaa is Lys, His or Arg
  MISC_FEATURE (11)..(11): Xaa is Lys, His or Arg
  MISC_FEATURE (15)..(15): Xaa is Lys, His or Arg
  MISC_FEATURE (19)..(19): Xaa is Lys, His or Arg
GLFXALLXLLXSLWXLLLXA

SEQ ID NO: 39978 - protein, 20 aa, Artificial Sequence
  endosomal escape peptide
GLFHALLHLLHSLWHLLLHA

SEQ ID NO: 39979 - protein, 9 aa, Artificial Sequence
  endosomal escape peptide
HHHHHHHHH

SEQ ID NO: 39980 - protein, 57 aa, Artificial Sequence
  chloroplast transit peptide
MASMISSSAVTTVSRASRGQSAAMAPFGGLKSMTGFPVRKVNTDITSITSNGGRVKS
